United States Patent Application Publication US 2007/0281896 A1 - sequence listing, part 5

SEQ ID NO: 467 - DNA, 5525 bp, Mus musculus
ctatggagactcaagcagtctctgaaagcgcaagcttccttttcgctcgccgggcaaacgtgcaccccaggcgctgtgtcctctagcggcgaactctcgcagctcgtctgtgagcgctcacctacagctagggggtccggtcaggagtcaattgacactcaaacctgagccctgagccgggaggaaagactcccgactgtaatgatgctgagaggctcgggtgcagtcgctcgaaccgcggcgcagctgattgtctgctccacggcagatggtctttgagcacagatttgcattcattgtcttcaaatctgttttcgcgctggcgttctagatttcaacagcagatctacgcgcagatcagaatacaaaaagagaagcaagaaaataacacccagccaggaggatttttttttaataggcacctccagccgtctagggtttcagctattttgtggagcctcggcttcccgaccaccaaccttcgcgaccacagcgctcggcggacaaagtttccaggacttcttcacagacgcctcgtgtctctaacgcagggttccccggccttcagggattggggagggagattttaaaaggggggaggattcgaaacttcatcccgcagttctcagccagccaagctgtcagcaacctctcctatctgcaaagaacaggtgatgcttccaaattgtggccactttctggagaacgttctgcagctggaaggatgcgggcgacctagagtggaagccccgaggcggcagatctgaagccaccgaggataaaaaacgcaaactttgcattgtgcgtggaggaacgggctggctatttctttccaagagggcccccaaacttcggcccttgccgcctttctcggattgcttttggagaacaccatttgctggcagcattggagagtgaggacggtgttgttgtaaagtcacttttaaggcgacagtagaggaccagactttttaaatgtttgggattcaagatacgctaggaagaggaccagctctgaaagacaagtcgctgggtgccgagatggattcggtcaggtcctgggtccggaatgtcggcgtggtggacgccaatgtcgcggctcagagcggagttgctctgtcccgggcccattttgaaaagcaacctccttcaaacttgaggaaatccaacttctttcattttgtcctggcgctctacgacaggcagggacagccggtggagattgagcgcacagccttcgtggactttgtggagaatgacaaagagcaaggcaatgagaagaccaacaatggtactcactacaagttacagctcctttacagcaacggtgtccgcacggagcaggacctgtatgtcaggctcatcgactctgtcaccaaacagcccatagcctatgagggacagaataagaatcccgaaatgtgcagagttctgctgacacacgaggtgatgtgcagtcgatgctgtgagaagaagagctgcgggaaccggaacgagaccccttcagacccggtcatcatcgacagattctttttaaaatttttcctgaagtgcaatcagaattgtttgaaaacagcgggaaacccaagggacatgaggcggttccaggtcgtgttgtccacaacagtaaatgtggatggacatgtgctggctgtttctgacaacatgtttgttcataacaattctaagcatggaaggagagcaagaaggcttgacccatctgaagctacaccctgcatcaaagccatcagcccaagtgaaggctggaccacaggaggggccatggtcatcatcattggtgacaacttttttgatggtctccaggttgtgtttggtaccatgcttgtatggagtgagctcataacccctcatgccatcagagtacagacccctccccggcatatccctggagttgtggaagtgacactatcttataaatccaaacagttctgcaaaggagccccgggcaggttcatctacacagccttaaatgaacccaccatagactatggcttccaaagattgcagaaagtcatcccaaggcacccaggtgaccctgagaggctagctaaggaaatgctgttgaaaagagctgcggacctggtggaagccctctacggcacaccacacaataatcaggacatcattttaaagcgtgctgcagacattgctgaagccctgtacagtgtccccaggaaccccagccagattccagctctttccagctccccagctcacagcggtatgatgggtatcaactcttacggcagccagctcggcgtcagcatttcagagtccacacaaggaaataaccaaggatacatccgcaacacaagcagcatctccccgcggggatactcctccagctccacgcctcagcaatctaattacagcacctccagcaacagcatgaacggctacagcaatgttcctatggccaacctgggtgtgccaggatccccgggatttctgaatggctcacccacgggctccccatatggaatcatgtcttcaagccccaccgtgggatcctccagcacgtcctccatcctcccgttctcctcttcagtttttcctgctgtcaaacagaagagtgcctttgcccctgtcatcaggccccaaggctccccatcgcctgcctgctccagcggcaatgggaacggattcagagccatgacaggacttgttgttcccccgatgtaaagcggaagaagaactgctttctcatagcacaaaactacttattccgatggaccaattatgaaggaagcactctgagcttgttggggagagttgcgcccccaagcggccatgttggacagatttgggaaggcagagagccgccatcttggtctcgtgttcctcatgaagcattgacagtcactacacaaactgacccttttggagacaagagcagagaaatgtcattgacgtggtcagtgctaagagcagcaattctttgttatgaacattacaaaaaccaccttcctatgtttgtaaaatatttaagaaaaacattggcaaacattcatgcttaatattttggatactatttgtttttctttgtaggaaaaaaaagttgaaagtttctattttctatgaatcctttcagataccaatttagtttatgcagaaaaaaattgaacaaaacagggtaccagcatggaagactttcttaaaatgaaacctgaattgaatgaggaaatgttgtatgtgtgtttgcttatactttaagctcttttaaaaaaaaagggaaaaaaatttaaaatgttttacagttatttaaataaataaacgtgtaacttattgtaagtagaggtagaaattaagaccttttttaagaagagaagaatttctcttcctgatgtaaaatgaaattgacacacgtagtgaccagttttaaaggtgtgttgttattacagttgcttattagattcttatcctacatcccacacccccctctttttccatcactttatcaacccatgcacaagaatgtgtaacttgtgcagattcccacagaatccaccacagaaaccagactcagataaacgccagcacaccaacacttcaatccaccactccattcccagatctgctttctagttcacagatcccttatggtgtccaatcttggtgaagcgttttgaaaaaatacattcctccctgagcaatgcagggagtccccatgttaccctctcagctttgaacatcctcaggcaagaagtatctcacctctaaggagagtcaaagccccatggctacactgaccaaggactcttcagaatttctctccaacagagccccacagtccttcctctttgggtactcgattcaggcatggaggcaggaagctccatagaactttggagaaagaacttggggagcttggttgtgtttcttggactcttaagactcagtctttgactgtttcctttctatgcagagtttttcttttatgttagtaaactcccttggaaaagcatgtatctcacctgacactgtttctgagatgagcagggtggggtgaagaggaacgaactcaaaaccccctaagtggctctcttattgggagattcgtggcagctgtgttccaagcggtgcagttacccagcctgccctgggagccttgtgctacctacctagttcttagcagggaaaaccttgcagtagttgctaacagtggtagactcttgaaaatgtgtgtggtcctggagatgcatctagacttgcttggcttgccaataggatgtcatgattttccaggtgtcttctctttgattccaatgacttagcttggggttcttggttaggcttctagcattggaaattgatgtgtctttcacggaaaaaaaaaagaaaaaaaaaacaaaaccatcattagtacttctgagccaattttagatgaccctctcattgcccgactggcacatgtcctcatccaaccctcaactggattatttgccttcagtttgctagaattacccactatgacattttttttctatgcacatgagaatccacaattttagaaacctggcatgcttataaccactgctgacagtccttcataggcagggctcacagcgccaaactatacggaaatgcatgagaaaaacctccctggctaacaacctggtacagggaaagaacgtgtggaatacgagcattaccatcccacaatggaggcagaatacaattaagcatgtttagacctggctttgagccaacccaacctaagaactttttctttctttctctctctctctctttctttttttaaaaagtagcatagcttttagaacctgtgaatctttctcttgcatgaggattagtgcagttctgtctccagaatgatcgtagaatctgtcagtagctttacaccgaagactgtgtgtaactaaatactggacatctttgaccattcactaggacatcggcagccacagatctatttaattgtacaaacgtgtgtaagggttatttttagtgtactaataaattaaaaacaaagccactctgtcctctttagtcattgctattaaatgattctggtcccaggttatttttatgccacttggcagacaagtatctctataggtaatgacaaaaattctgttctatttttgagaggagctgtgtaagatttttttcatttaaaggtacaacttactgcattatctcatttctttggttacagcatcgaaattcttcccagtttttctttgcacatttcaacatgcatggtttaaacaccattacctttaccttttgtacagtaaggcctcatttccaaactgtatagttttgggtttttttttttgtttgtttgtttgttttcttgctttgtcagttacatacagtataaagttgctatgcacagagctttttgtaaagacagctttttttgtttactgtttttaatggtcttccttatgaaagaatatcttgtttgtaaaatgaatatgtctacttctgttttaaactttaaattatcctaacaaaaaaataaaatttttgtactg

SEQ ID NO: 468 - protein, 569 aa, Mus musculus
MFGIQDTLGRGPALKDKSLGAEMDSVRSWVRNVGVVDANVAAQSGVSRAHFEKQPPSNLRKSNFFHFVLALYDRQGQPVEIERTAFVDFVENDKEQGNEKTNNGTHYKLQLKNGVRTEQDLYVRLIDSVTKQPIAYEGQNKNPEMCRVLLTHEVMCSRCCEKKSCGNRNETPSDPVIIDRFFLKFFLKCNQNCLKTAGNPRDMRRFQVVLSTTVNVDGHVLAVSDNMFVHNNSKHGRRARRLDPSEATPCIKAISPSEGWTTGGAMVIIIGDNFFDGLQVVFGTMLVWSELITPHAIRVQTPPRHIPGVVEVTLSYKSKQFCKGAPGRFIYTALNEPTIDYGFQRLQKVIPRHPGDPERLAKEMLLKRAADLVEALYGTPHNNQDIILKRAADIAEAKVPRNPSQIPALSSSPAHSGMMGINSYGSQLGVSISESTQGNNQGYIRNTSSISPRGYSSSSTPQQSNYSTSSNSMNGYSNVPMANLGVPGSPGFLNGSPTGSPYGIMSSSPTVGSSSTSSILPFSSSVFPAVKQKSAFAPVIRPQGSPSPACSSGNGNGFRAMTGLVVPPM

SEQ ID NO: 469 - DNA, 48473 bp, Mus musculus
  misc_feature (1)...(48473): n = A,T,C or G
tgaactctctcctcctcctctggtttctcttctcgctcccgcggccccctcctccccgcacggctgaactcgagctcagcccgccaggccgggccgcttcagggggaggcgccaagtgtctgctgttcttggccccgggcgagcagtccccgctgccggggagcggaaaggacgcgcggcgcggaggtaagcctgcgtgtgggcggcaggcgcgggtgggcgggcgagtcccgggggcgaaggccaggcggaggcctcaccctgcgcccggcccggtgcgcagccgctgcgggggcagggcgcagcgccaacccacccgggccggggcccggcgcgcacgcgcgagcccgtggaccaggtcgctggggtagctctgggttcacgtcccttcccgggccctgggaccgcgtagcggtgcgcatgcgcgcaggcccagcccggggtccgttttgtgcgtcgccccgaggccacggctgtggggttcccgcttccagttgggggaacccctgcccctggtgtctccaaccctcccgtgcacgcggcgcgagctagcggtgacgtttccaggactttccgctctttcccgcccgcagccgcctcgccgaccccatggcggcacacgctttaggcctttggtccccgaagtggagggatggctgggaaggcctggctgtcctaagggttttcagtcctttgggcgttgctgaggccggaagtggaggagtttagaggtgaaaaacttttcccgatgccccttcttggcggcgatggaacttccgcctgagttgaagctaggcttccagccgcctttttgcctttctttacaaggtaaagatttaactcggactgtagcagaggacaccgaggtgctgctcccttgcacaccctgagattgccctggctgcacggactaagcttggccacattgggccacttgacgagtttgttgtgacaatcagagagatttaataaatgtggccacgttgggaaagggaacaaagagaggttcagtgacccaggaccccttagaggccctaacttgaagtttaggtttaaatcgtgagcaaggggtgtatgtgcagagttggcctggtccaggtttggtccggcctgtcactgacccatcctgtctcgtctcggcttcagtcacaattccttggagtccaaagcctgatacctgaacggagaggcgaacatgtttctctttagaattatcttccatcctgatagaacggttttggcgattaaagccgagtaaaagagaccgagttcacagtcctgtggaacttggttctttagtgcattcatgtgatggtcactgtttaacggtcattgagtccgctctgtattcgcaccttcctagtaaaatctgtcaccgtattggacaatggcatgcaggtaagtcagtttccagggctactatggagactagcaatgccataacttctgtgctctctagtcacgtggttatgagttaaaccgaaaaatcccgatactttcaactcttacctatacactgggaagagcagtgacacctgtcacagtggcagtgctgtaggactcaggatggagcatcgaagtattccctcctaaaaggactttccattcaccacagaaaatgaagaagtcagaatctttcatataggaaaaactaagcaaataacctctgcaggtgtgctcagaaaaactacgtagccaactttccgtatccttatattctgcaaccgtggattcaacaaatcttgaattggaaatattaagaaagacccttgactggacatatagaatttgggggagggggattattattaacaataaaatacatcagcgttttaaatttagttttttcttttaagacgtgtacttcactggctccgactggcctgaacaatgtgtcagggtagcccaggttggcctgggattgaagagcagcttcagcttctccagtattgaggtcacaggcaccaagcctggaaggatagcaaccacccacactagtgttagtcctagggctggctggaagtacacaggagggggtgtgcctggctgcatggcacattgcttcttttgtaagtgacttgaacattgacagagtatagacttgctggggtttgggtcctgcagcagtctcactctactctggcttactgtaccttaatgtcccccgacatgaagtcatggagatgactagtgtgatgccatgatttcagcgatccctagaggtggttttatatgagccagacaaatgtaagcggccattggctgtaaaggacttagaggggacatggatgaagagggactattttaggacatgaagtgtgtggttcccttgaggtctttcatttaaatgaagtagatcagacactccatgctcaggcacgaaaaaaactattattcttacggtatacctgcagggaatgctcttatttccctttgtccattggagattatcatatttaatttcagctttaacaaagctgaagagaagttaaaatgcctagtagatattgctgttttcaaagtttatctgatttgatttattataacaaatcaaaattgttggggaaaggatgctgggaaaagaatcatgagtgtggcagagaggcattaaagtctccgtccaaggctgaaaacaagtgggaatgcccccttacgcagatcagccccccatctgtaaagaatattcataatgtctgtcatgggatgcttcaggtgactcttctcgcttcccttatctggaagaagcgtgtgtctctttcaggtggtgacttcaatctgaaacatgatctgaaggagattgaaagtacagtagatcattaaacatcaggctgacactcgagtgtgtgtttttaatgtcttcagctctactcatctaatctgagctaatgtacattgttctccccacccccagtacacttttgagctaacaagtgctgatgaatgatagctaaacttgagtgttttctatactgtgccaagtgtataaaaaaggattcccaagaggaagcaagtggaggtcgaggatccactgtattcaggaatcatgttgttgagccaagtctttaataggataatagttacctcatctattaatacctatttaagcattgcatgtataagaaattacctctcaaatggacttacagatggctctctgtgtcagctcatgtcacttatggagcaacataaaatatattttcccacttgacggtgacgttttgtcatcagtgttgagctcagtaaaccaaagactacctcagcattgctggaggctggtttaccctgtgcctcactgagaaatttggaaaccaaacagacaatgacaacagcagttatgtgccaccatcagtgcactcctttcctacgcactgggtggcacttcccttgacagtgcgctggctttcccattgctcctgcatagttctgtccacctggctatccaccctggtgcacctagcagctgactgttaacattatttttattcgctagatgtaattgtcatcttggaggcttatgcctctgtctggtaagctaggtctaacactgaagcttctagctccatacaattttattgaggcctagactgttttcagcctttgaaactgaatgttgaataaactcacccttcctagttctttctgattgcaggctggctgattcaactcaggtgttctggctcaaacacccctgaaagctgactgtttcaatctgacttctctctgggccactgactgaattgttgtgcttggcctcatatgcttggcaatatgttctgatcttctgtctcttctcattctgtcttgttctctcttcgcctattgcttgttctctctgcaaactgtaactctcccggtagagctgcctccttttctctctccctcccccctccccctccccctccctttctgctgttccctcttaggttctctctctttcctctcgtgagttgggtgtattctgtctctgactcattctgtcaaatctttctctgactcactttgtctgccactcaattagaagtcattttcttttttttttttttttagaagtcattttcaaagatgggtgcttcttctagaaactaactttaccttcattgtttgggactaaaggtgtgtactaagagcatgtctgcattccagccacagggattaaacatgcatgctaaagactgagccacaccacaactagaatttttttttctctttctcttttttctgtaaatagcctcagggcccacagtttgatcagacatcttgcagcagtcaggtgtcttactgttctcatttgtgacttccagcatctcattcaagaggagctgaattataaacaatgcagttgaccaactggggctgtgttttgtcactttatatacttacattacctgtaactcggggatgacactaataaaaggaaatgatactgtttgattactctgtgaacacgtgtggggacccccatggtcattcactttgtctgcagcttccttacatactgatactgtaaaccctgctctcctgcaccgcctgcctttgactcagtaaggagaatctcagatgggagaacttgccagtagcattgagttctctatcacaaggaaaatgcattatgtccctaaagcctggctttagagctgatcccatggaattgaatttaaaagcaaatcttggatttctctgaggaatgcctcctctttttaaattttcttctgagattacttctcatagataactatcagcgtttagaagnnnnnnnnnnnnnnnnnnnntttttctctttctctttttttctgtaaatagcctcagggcccatggtttgatcagacatcttgcagcagtcaggtgtcttactgttctcatttgtgacttccagcatctcattcaagaggagctgaattataaacaatgcagttgaccaactggggctgtgttttgtcactttatatacttacattacctgtaactcggggatgacactaataaaaggaaatgatactgtttgattactctgtgaacacgtgtggggacccccatggtcattcactttgtctgcagcttccttacatactgatactgtaaaccctgctctcctgcaccgcctgcctttgactcagtaaggagaatctcagatgggagaacttgccagtagcattgagttctctatcacaaggaaaatgcattatgtccctaaagcctggctttagagctgatcccatggaattgaatttaaaagcaaatcttggatttctctgaggaatgcctcctctttttaaattttcttctgagattacttctcatagataactatcagcgtttagaagcctctggtcagcccttagctcttcaggctgtctgaagcacttgagaggtggctctttctgtcttcacagttatgttcttttacacctttgtttccactccctggaaatgcagacagtaagacagtattagtcatgtgacttaggcaaatgaacatgtgctccatcatcaccttaactcctctgtgtgtcccttgtttgtaagtaatgtgccacgctgtgctgcagacaactccttagtaatgattatttcactaacagtgaaacagctttgtaggggtgcgaagtattcacgctattctcttaaggattaggaggggatatgctggtcatgttatactccttttgtttaccagtcttcagctttgctgttactaacagtgtcgaaaaagcctacaaaatataacatattcaaatgaggagttgtctgtctcaaacaaggataatttagaaacaagctatcaaactatacaagtttaagaaaacagctggaaaaaaatagcaaaacggatgaccctagttgatactcatttggcagtgaacccagggctcctggctttccagctatgagccttggaaagtggacacaggggcaggagcttcctctggtagaaggtcttccttccttatcttggtttgtatctcaaggaacaaacagtgacatcccataatgttatttttattattttaaacaaaatgaggagatgtagaggaaactgtttgcagagcgtactatggagtatgtaaataagccaagtcatatagcctgctatggagtatataaataagctgtcatatcacctgctatggagtatatatatatatgagccatgttgtatagcctgcaggagctggaggatgaaaaagcagtgaaattccatgcggtagagtagtaagggcacccactgtggtccccactgctgggaccaacttactgtaggtgtgacactgttactctgaagagttgtcccaatatgaatatccacgtctgctctggtccttcaggaacactgcctttctttacagaaaagggggactcctggaagccagtatagagcagaaatagagagcatttgtgttatcctagcatcaccgatattcaacaatttttttttcctagctcagattctccttgccaggcatttagaatgttgtattgttcgatcatattaatttgtttttaaaatggcagagggaatcttggtttagaagtcatcattatcaatattctatgaaattcctgtgttcatggtaaaggtagagtcacaatggcggtgctcttgttttagtgttggttaacatcatcccacttacagactggccatgaactgacaatgtagctagctgaagatggccttgaactcctgaccttcctaaggacagggatcgtaggtgtgtgctagcacagcgagccgatcctgctgattggaaaagtggtagtatacagatccattgttacaattacaagggatcttttaactttggcatcaccttcatcaaaagattttctgtgagaattctcgtcacagcctagccgtgaattaggttgtcatgcgcagtacattaactgaggattgttttctcagtgcccttaaactttatcaagtggtctgttacaccgtttgtattattttgtgatatagtggtttgttcaacattgctaaatctaggaaattatttttagaggtttatttctaagtgtgtgtatgtgtgtgtaggtttgtacatgtgtgagagggtgcttgtagagatggaaagaggccatgggatcccttgcagctggagtgcagacagttgtgagctgggagccaagctctgatcctctggaagagcagaaacctgcactcttaactgctgagccatctccccagcccctagagaatctatattagttgattatggtatgtttgtgccacgggttgtcagtctgttggtagattctgttcaccccattttttgtttttgttttttattattccttagggttttttctctggtttgctactactgcaggcttcatctttttaaaactgtgaagtcatgttaaccacattctcttttacattgaaatagtatggagtgacataggactgtgatggacagaaaagcagagtagtataaacaaagagattcactgtctcatgtaggaggggtgagaattatttcataagatgatgtgttagtcaacattgtgttgctatgacaaaatgcctaaggaaaccctttaaacagaggaaaggtttacagcacagtctcgggcctcttgcttttggcgcattctagttggagcccatggtagagctgaatgcttatttcatggcagcctggaaacggagagaggaaaagaccaaagataagatatatcctatggctggcaaggtggcccagtggttaagagcactggctgatcttccaagggacctgggttcaattcccagcacccacatggctgcccaaagcatctctaactccagtctcccaagatccagcactgtctcctggcctttttgggcactaggccaatgtatgtttcaaagacaagcatatacataaaacctatacatgtaaaattaaatacataggggtgtgtgtgtcacacacacacacagaggtatctannnnnnnnnnnnnnnnnnnnnnnnnnnnnnnnnnnnnnnnnnnnnnnnnncactgctgcacttgggaccacactgaacacatgagttttggggataaatgtgtgaaattcattccataataattgtgtccatatatgcattaaataaataaataaataaataaataaacaaacaaatgatgttgcagtgactcaaacactgtggagctgtttgtcagagtgcagactgactgaatcatttgtgtgccttttacccctctgtaagtatgccactgtccctaggtgctgtgccctgtcagtctctgagggtactaggggatacagatgaatcctgtgatgaatatgagcatctttagccccttggcagcagtcagttctggatgctgcagccatcttctctcgtgttgtgcctgtcatagcttacatttccccacaaatctactattctttgtggtctgtgcatccatgtcttatttaagaaagctcttgctgggtgagaggcataggcctataaacatagctttggggaggttgactcaggaagattctaaggtttgaaggcaacttgggctatataatgagttagttgttggccagcttgggctatacgaaaggaccctgtctcaaaaacaagcaaaaatcttcctgtccatgtaaaaatgtgattgtttggcttttatatttcatggggcttcttttttgttgatgagtacaatgagagtttattgtgtgcctggatgtcctggcttatgtactcgggggcagagcaggggatctagagttcgatttacatggtgaatttcaggtcagtcaaggctacatagtgagaccctgtctcaaaatccaaaacccaactttgttaatatgtatttttgcatttgtttcattgttcacactgttaaaaccttgtcttaaaacttataaaaagtatatccagaagttgcatttttatcattttaatattttctatttatgtatctccactgctattttttaatacaagacatgatacaatttaagaaacatttcccttaacaaataatggattgctaactttggaaaattgtgtattttctttttttaatttctctaatagaatttatgtgtttatatttttagtcacattagcttttttctggaagacagctttacaagaatctagtcggaccaaatttcgggctccagaacattccaccaaccaggtacagacacttgtcgaggggatgctcctagccactctctgtaaggtatctgggatgtacacaggaagactgacccagcagtaggagcgggcagaccagctgtggccttgtgacatgatcatgccatcatttacaaggttctcgctcgaagacactttaagttacaaaaatgttacacagcaaatctcagaatggttttggtaattttgcagttttggttaggacacactcgtggttggcccctggcccgtgcttgtgactgatgggtggcaggttggacatgcccgctgagagggtccaagagcttggaagcacttctgggtttcattctaagttctgatctgaccaggtagtgctattagtcaggttcccgaagtatcctaaactaaagacaatgattgtgccttctttttatgattatggtctggatattgcagagaataaatgaagcgcactctaaatgtcagcgttccacacaccaggcttatgttttacaggactgctggtcacagtagaagagnnnnnnnnnnnnnnnnnnnnaatttcgggctccagaacattccaccaaccaggtacagacacttgtcgaggggatgctcctagccactctctgtaaggtatctgggatgtacacaggaagactgccccagcagtaggagcgggcagaccagctgtggccttgtgacatgatcatgccatcatttacaaggttctcgcttgaagacacttaagttacaaaaatgttacacagcaaatctcagaatggttttggtaattttgcagttttggttaggacacactcgtggttggcccctggcccgtgcttgtgactgatgggtggcaggttggacatgcccgctgagagggtccaagagcttggaagcacttctgggtttcattctaagttctgatctgaccaggtagtgctattagtcaggttcccgaagtatcctaaactaaagacaatgattgtgccttctttctatgattatggtctggatattgcagagaataaatgaagcgcactctaaatgtcagcattccacacactaggcttatgttttacaggactgctggtcacagtagaagagtcatgcaggtgacagagacagctataaccccctacacacacacacacacacacacacacacacacacacacactgcatctcaaatggtgcaaattagggaaatcagttttctctacacacacacacacacacacacacacacacactgcatcccaaatggtgcaaattagggaaatcaatcagttttctctgtcgtagctggtactttgacatggtagaaaacaagtctaccatctttttttcaaacaatactaaatgtgtttacattatttcacattagtaatttgttttgagttatttttaaactttgactaactctggataacatgaaattgttagcattagagttaatcctgattggctcttatgaatacttccccctttgaatgtgttatttccttatgctaggcatacagttacatttttacctgactagtttagtaaacagaatggactattattaccagcgttcttaaggagttgattggtatttacagtgatcaaagaaggatacagctaaaatcctttttttttttttacataaannnnnnnnnnnnnnnnnnnnnnnnnnnnnnnnnnnnnnnnnnnnnnnnnnnnnnnnnnnnnnnnnnnnnnnnnnnnnnnnnnnnnnnnnnnnnnnnnnnnnnnnnnnnnnnnnnnnnnnnnnnnnnnnnnnnnnnnnnnnnnnnnnnnnnnnnnnnnnnnnnnnnnnnnnnnnnnnnnnnnnnnnnnnnnnnnnnnnnnnnnnnnnnnnnnnnnnnnnnnnnnnnnnnnnnnnnnnnnnnnnnnnnnnnnnnnnnnnnnnnnnnnnnnnnnnnnnnnnnnnnnnnnnnnnnnnnnnnnnnnnnnnnnnnnnnnnnnnnnnnnnnnnnnnnnnnnnnnnnnnnnnnnnnnnnnnnnnnnnnnnnnnnnnnnnnnnnnnnnnnnnnnnnnnnnnnnnnnnnnnnnnnnnnnnnnnnnnnnnnnnnnnnnnnnnnnnnnnnnnnnnnnnnnnnnnnnnnnnnnnnnnnnnnnnnnnnnnnnnnnnnnnnnnnnnnnnnnnnnnnnnnnnnnnnnnnnnnnnnnnnnnnnnnnnnnnnnnnnnnnnnnnnnnnnnnnnnnnnnnnnnnnnnnnatagagaaaataagtcacatagtgtgaggcagaacacgtgcagagtgccattcttgagcttgcaaagagagaagcctattgggtgagtcaggaggcacagcggtaatggttacagtagggtttaaagaaaatgaggattccagcagatctgctgaagtgccataatatataatggtgattaactatagcaaaaatattttaccaagtcaaatcatgtaattttacaagagaaaaactttaagtggtctctctttggttttagttttgggtatgcaaatggtctgcccgcgaatttcaccttcagctcctaagtaagcttctaaatataagcaggcctttaacactgacttttcaaacttagaaagaattcattgtcattgtcttaaattcaaattttctgaatgcattagtctccacttccagttgagaaaaaattacaaatttcatcaagaacatataaaacactgataaggggcatggtgacatttgacccccgtttgattatttttaatctatcttttttgacttttagtgacggaagcaaacaccagataagactctgtgatagcaatgcttgcaagatgcgttgcattgaagtaatcagagcaagcctaatacattagaaaacagtggccattactaaagacagcttcgtttgttttttgttttctttgacagggtttctctgtgtagccctggctgtcctggaactcactctgtagaccaggctggcctcaaactcagaaatctgcctgctgctgcctcccgagtgctgggattaaaggcgtgcgccaccatgcccggctctagatacagttttattaagttgactttcagagggcaatactgcttcatttatactgtggttgaaccacagtggagagcctgcatgtcttccctggggttgccctgctgtcaccttagctcctgttgtcactttgatgggacagcgggaagttactaagcaaagagtattcagtgatcttgctacatacttgatagcttctgtnnnnnnnnnnnnnnnnnnnntggcaaggttagaacaaaagcatgccttggcagcttctctgttgcatgaaacaaccactgttcacacttctgatcacagaagtcttcctaggagatactggcagggtggtgcctgacatgccaatacataatagtatagggacctaggatgtggatggggctgatgtcacctaggaggctgagacagggcttcctgggatggtggcatttggacttcttaaggacgttaagtgtctcttcacagatgactggtaaaaggctttgcttaaataatgtttattcctttcccaaatattaaaaatcaaataaaaatagtcatagaagctacgcttccaactcactgtgctcttttattctttcccatcacatctgaacattacagtcaaccagcttaagtcaatgcagtatccagtgatactgtttcccacccagtatccagtgatgctgtttcccatgcagtatccagtgatgctgtttcccatgcagtatccagtgatactgtttcccacgcagtatccagtgatactgtttcccacctagtatccagtgatgctgtctcccacccagtatccagtgatgctgtttcccactcagtatccagtgatactgtttcccacgcagtatccagtgatactgtttcccacgcagtatccagtgatgctgtttcccacccagtatccagtgatgctgtttcccacccagtatccagtgatgctgtttcccatgcagtatccagtgatactgtttcccacccagtatccagtgatgctgtctcccacccagtatccagtgatgctgtttcccacccagtatccagtgatactgtttcccacccagtatccagtgatgctgtttcccatgcagtatccagtgatgctgtttcccatgcagtatccagtggatattattccccatcttgtatccagtgatactgtttcctatccagtatccagagactattattccccatcttatatccagtagatattgttttgcaccctatatccagtggatattgttttgcatcctgtatcttttagatattgtttgacatcctgtatctagtagatattgtttcacatatttcagcctgcctattgattgctatcttgtgccttatggtaagtttacaaactatatgctcacctccatgaaacagtttaatatagtcatttgttatttttctacttgagaaaataaaaaaggtaaaattcaataaattataataattatataaagctagcatagtgtacagaacagcctgactttgaaattcaaacacatgctgacatgaatgttatgggtgaatccttgtaggaatttataaaaataacttacaaactactgataaagattgagaaacttacaaaatgtagtagaggactgactggagagatggcacagcaatgaggagtgcctcttgctcttgccgaggacaagagtttttggttctcaaactcttggttcacaatcgtctataactccagcttcannnnnnnnnnnnnnnnnnnnnnnnnnnnnnnnnnnnnnnnnnnnnnnnnnnnnnnnnnnnnnnnnnnnnnnnnnnnnnnnnnnnnnnnnnnnnnnnnnnnnnnnnnnnnnnnnnnnnnnnnnnnnnnnnnnnnnnnnnnnnnnnnnnnnnnnnnnnnnnnnnnnnnnnnnnnnnnnnnnnnnnnnnnnnnnnnnnnnnnnnnnnnnnnnnnnnnnnnnnnnnnnnnnnnnnnnccccctacacacacacacacacacacacacacacacacacacacacaacatgtgaatagaaaaactcctacttccttctgggaacagatttcataaaattaaacaaatgaattcacagaaacagcagtgaaattatcttactatatacaaaacgttacctccagaaaatctacaaaaggtgaggtagtgcatgtattttttaaagacattgttttactagccatgcccaacatgatgttttgattcttctatatagactgtagtttaaactgaattgtgacagcttgccagtttgctgtgctctacagtggatttctcagtagatacagagcctgtttgttccagaccgtacacccagactaacagggtgtatcttagtctctaattcatggcaggtgaatttctggtagtatgtttaccttgtcatagttaatatctcattacttgcattttgcaaagagatgccagctacaggtaggggcagtggaaaggaggtgaattaagtagtataagaactccaaaggaagtgatcgtgtagtcaggagggtccctggaccacctgggaactaaattccagagatactgtcttaatgatgaatattgtgaggctcagtttcctatattttcttgttcatgactagttgtcttaggtttctgttccgtgaaacaacatcatgaccataagcaagttaaggagaaaggcgtttatttttgcgtagacattcacatcacagagcatcactcctcagtgcaagagcttgaaggcaggagctgatgtagaggccatgtaggggtttagtttactggcttgctactagcttgcttctgacttgcttctggcttgcccaatttgttttcttatataccccaggcccaagtctaaggagacaggttcttgcttaagattccttcttcacagatgaccctagctattgtgtcaagttgataaaaatactggtcagcacaccagctcttcagacaatccctcacctgacagcggaagactaaaatgtaggcatttctggaacacagaatggttgacacatgatcgaggctcctacatgtgatgtgcagtaaatctttgtacgttgtgtctcatgagtgtcctggaacaaaatgctaatttccattcagctactattaaatattgtctccaaatagtatatgcatttataaattaagctatcagtctgctatgtaatagttccctcatggatttaaaagatggattttatatggctgctgccaagcatctagctgtctcacagatttgaaaagcaataatatactcctatgtctagtgtgcttggactatttgtggctactttgcattagattgtgacctcctaggaaggaatggtggtaatgtcttattttatgtctttaattcagtaattcgatcttacctgacatttccctgctcagtagcatttcttaataaatgtaggactgcagattgcgtgaacctcactcacacagaggaatcttcctgttcagagactcatgacctgagtattatgcagatctgtacacgttggtcaaggagatggttcaagtgaataacttgtagacaagtgtttaggaaatggttagaatttacaacttgattcttagtatccagaaagccacttgattttgtagcaagggccaggataaaatctcaaagcatgcttgaaaggagaaacagctgaggtaattagtaaccagttactgcagcttgccaatgcatgggaaacagccattgaggactcattgaggactctgctgcactgggccctgaggggaactttttgctcagcactcaggcctttgttctcctgcaccttgaaggttctgatcttgtggggttgtgtgatcactgtgaagactagagagaatatataaaaaccatagaaggccactaataacatctccattagattctttatgccacgtttcaaatcttactcttcttaaaatttacagaaggaaaacaaattaagcagacctcataggaaataagattccttcatgatatgaggaggtaggtactttaaaatagaatcttagattagaatctcacaacacaggtctgttatctgtgaaccagctttcagcaagtcactcttcttccaggagacaaaatacatagaaagaattctgattttatgttaaaactcgttgatttccaagttaatataacatcatcctataaagtcttcagtttcctgaaatacccatgagtgtagggacctagcccacatcactgcagcttcttgtacatgtgagatttaaaaacaatgccagattccaaagtgaggtttatttttgcatgcccactgatactgtttggcaaaatgcttctggtgtttagtgactgaagaaacaaacagtaattactgcttcagaattgaacagagggagacagccattgctgttgtcccagatatgaaggtagaaggtgtcattcttagcatagggcttgcagctagcctgaggaaacatggagcggagagctggaaataagggcgtgcagccacccatcagacatttttttcttcatttaatgagtactgattgtatacaaaccttcattcaaggcaccaaaggggtcgtgatggnnnnnnnnnnnnnnnnnnnnagttgattgtatttacagtgatcaaagaaggaatacagctaagatccttttttttttttacataaaactctgaggattcctagtcactgatggaggttcccttgctgctggcagcaggagtcctaaggggcagcgagggcggctacctctgtttgctccttctacctctccctcctcccctcttcccaatttttcctctactcttcctaatcattcccttccctgcccttccatcttatttttatttctgtgatgctggcattgaacccggaacctcacccatctgctctcattgagctacgcccctgagcccaaatctcttttctctttttaaaatttcttattctagtaaatttggtgttaaatatgaaaaaggtatttccagatcggttgaggctgcaagagaggggaagggcacccttaagtgcttaggccagggattgttgctcagaggtagcagtgcttggtctgcatgttcgagacccgagctctgatccctagcactgaggtgtgggagggagcctcagtaggcatgccagattctaatataaagaccctcctttccataacttggaacataatgtatatgtgtcatatgtcctggtagctctagtaacaaaggatgtgttctcctctcttgaacaagcttgccagttgatagagaaataagtcacatagtgtgaggcagaacacgtgcagagtgccattcttgaggttgcaaagagagaagcctattgggtgagtcaggaggcacagcggtaatggttacagtagggtttaaagaaaatgaggattccagcagatctgctgaagtgccataatatatgatggtgattaactatagcaaaaatattttaccaagtcaaatcatgtaattttacaagagaaaaactttaagtgatctctctttggttttagttttgggtatgcaaatggtctgcccgaatttcaccttcagctcctaagtaagcttctaaatataagcaggcctttaaaactgacttttcaaacttagaaagaattcattgtcattgtcttaaattcaaattttctgaatgcattagtctccacttccagttgagaaaaaattacaaatttcatcaagaacatataaaacactgataaggggcatggtgacatttgacccccgtttgattatttttaatctatcttttttgacttttagtgacggaagcaaacaccagataagactctgtgatagcaatgcttgcaagatgcgttgcattgaagtaatcagagcaagcctaatacattagaaaacagtggccattactaaagacagcttcgtttgttttttgttttctttgacagggtttctctgtatagccctggctgtcctggaactcactctgtagaccaggctggcctcgaactcagaaatctgcctgctgctgcctcccgagtgctgggattaaaggcgtgcgccaccatgcccggctctagatacagttttattaagttgactttcagagggcaatactgcttcatttatactgtggttgaaccacagtggagagcctgcatgtcttccctggggttgccctgctgtcaccttagctcctgttgtcactttgatgggacagcgggaagttactaagcaaagagtattcagtgatcttgctacatacttgatagcttctgtttcagactttttgttattgttgttgttaaagttcagggtgacaaagctgcattcattccttcattcattcatttcattcatttctccttttttttttttttccagcttagcagattatacattcttcaggagctgagagctgataagtctcttcttcaccgtgatttgaaactttccagtctcagaaaagctgaccaaggtgtagaattttttttttctctatcaatagaaaagtcatctgtgagatgggaactcctgaacacttccttgtagacagaaggacctctgtttctacagggtgacctctccagatttcaggaggatggtccccttaggagctcctgaacaggaaaaaccatttgtagggcttagagctgttgcctcccatgctaaaggcttaattttgctatcacccgctcaccatatcgggacttcttttccctgttaatgagaagtaacataactttgtttgtctggcacaaggacttcctttgttgccccggtgtctctaattccttagccttccaaatgctgaggatacaggaacctgcttaatatagcagtttctgtgtgccttcatgtggcctggccttctgattttaccacgtactttttcctcagggactgcacaggactgatccatatggaagaagaagtgcctggtttctatggagaaagtggcaaggttagaacaaaagcatgccttggagcttctctgttgcatgaaacaaccactgttcacacttctgatcacagaagtcttcctaggagatactggcagggtggtgcctgacatgccaatacataatagtatagggacttaggatgtggatgggccagcaaggagctgatgtcacctaggaggctgagacagggcttcctgggatggtggcatttggacttcttaaggacataagtgtctcttcacagatgactggtaaaaggctttgcttaaataatgtttattcctttcccaaatattaaaaatcaaataaaaatagtcatagaagctacgcttccatctcactgtgctcttttattctttcccatcacatctgaacattacagtcaaccagcttaagtcaatgcagtatgccagtgatactgtttcccacccagtatccagtgatgctgtttcccacccaatatccagtgatgctgtttcccacgcagtatccagtgatgctgtttcccacgcagtatccagtgatactgtttcccacccagtatccagtgatgctgtctcccacccagtannnnnnnnnnnnnnnnnnnnactcgtggttggcccctggcccgtgcttgtgactgatgggtggcaggttggacatgcccgctgagagggtccaagaagcttggaagcacttctgggtttcattctaagttctgatctgaccaggtagtgctattagtcaggttcccgaagtatcctaaactaaagacaatgattgtgccttctttttatgattatggtctggatattgcagagaataaatgaagcgcactctaaatgtcagcgttccacacaccaggcttatgttttacaggactgctggtcacagtagaagagtcatgcaggtgacagagacagctataaccccccccccacacacacacacacacacactcacacactgcatcccaaatggtgcaaattagggaaatcagttttctctgtcgtagctgttactttgacatggtagaaaacaagtctaccatctttttttcaaacaatactaaatgtgtttacattatttcatattagtaatttgtcttgagttatttttaaactttgactaactctggataacatgaaattgttagcattagagttaatcctgattggctcttatgaatacttccccctttgaatgtgttatttccttatgctaggcacacagttacatttttacctgactagtttagtaaacagaatggactattattaccagcgttcttaaggagttgattgtatttacagtgatcaaagaaggatacagctaagatccttttttttttttttacataaaactctgaggattcctagtcacggatggaggttcccttgctgctggcagcaggagtcctaaggggcagcgagggcggctacctctgtttgctccttctacctctccctcctcccctcctcccaacttttcctctactcttcctaatcattcccttccctgcccttccatcttatttttatttctgtgatgctggcattgaacccggaacctcactcatctgctctcattgagctacgcccctgagcccaaatctcttttctctttttaaaatttcttattctagtaaatttgacgttaaatatgaaaaaggtatttccagatgggttgaggctgcaagagaggggaagagcacccttaagtgcttaggcctgggattgttactcagtggtagcaatgcttgctctgcatgttcgagacccgagctctgatccctagcactgaggtgtgggagggagcctcagtaggcatgccagattctaatataaagaccctcctttccataacttggaacataatgtatatgtgtcatatatcctggtagctctagtaacaaagggttgtggtctcctctcttgaacaagcttgccagttgatagagaaataagtcacatagtgtgaggcagaacacgtgcagagtgccattcttgagcttgcaaagagagaagcctattgggtgagtcaggaggcacagcggtaatggttacagtagggtttaaagaaaatgaggattccagcagatctgctgaagtgccataatatataatggtgattaactatagcaaaaatattttaccaagtcaaatcatgtaattttacaagagaaaaactttaagtggtctctctttggttttagttttgggtatgcaaatggtctgcccgcgaatttcaccttcagctcctaagtaagcttctaaatataagcaggcctttaacactgacttttcaaacttagaaagaattcattgtcannnnnnnnnnnnnnnnnnnntgagcgtggtgtactgggccctgaggggaactttttgctcagcactctggtgtacatgcatgggcctttgttctccagcaccttgaaggttctgatcttgtggggttgtgtgatcactgtgaatactatagagaatatataaaaaccacagaaggccactaataacatctccattagattctttatgccacgtttcaagtcttactcttcttaaaatttacagaaggaaaacaaattaagcagacctcataggaaataagattccttcatgatatgaggaggtaggtactttaaaatagaatcttagattagaatctcacaacacaggtccgttatctgtgaaccagctttcagcaagtcactcttcttccaggagacaaaatacatagaaagaattctgattttatgttaaaactcattgatttccaagttaatataacatcatcctataaagtcttcagtttcctgaaatacccatgagtgtagggacctagcccacatcactgcagctccttgtacatgtgagatttaaaaacaatgccagattccaaagtgaggtttatttttgcatgcccactgatactgtttggcaaaatgctctggtgtttagtaactgaagaaacagtaattactgcttcagaattgaacagagggagacagccattgctgttgtcccagatatgaaagtagaaggtggcatagggcttgcaactagcctgaggaaacatggagcagagagctggaaataagggcgtgcagccacccatcagacatttttttctttatttaatgagtactgattgtatacaaaccttcattcgaggcaccaatggagtcatgatgggagagaatttagatatgtatatttttaaaatgtaaaagttaagtatataagtaaaagtgtctccagagtacagacaattgaaaaccactttatgacttatatatggtcctaggagagaggggcatatggtcatgaatcatgcactgttgggatttttgtgatcccccaagactatgatccaaagtccaatacccaggacttcagtgcaatcaatttatgtgggcatgaggtcactgaagtaatgaacttagttaagatgaggtcataaaggttggtactaatccagtctgacttgggtgtttctcagaaagggaattttgaacacaaagatccacatacacgaggccggcagtacagaccgacaaagggaagaaagccttttgcaagccaagaagtggagcctggaatagatctttcctgagggctctttaggggcaagctagctgacacctggacttgggacttctgagtctccaaaactgttactacatgtgttacttttgcccgtggtatggttgcccatgctaatgagcaaataagctgtctggatggttggttcttagtgacggttgctttgaatgtcaacttgtcacaaagtagaatcactttaaagggagccttacctgaggaagtgtcccgatggtcttgattggtgtaggaaggtccaccttgactgggtggcaccttcaggtaacaggccagataaaaagctatttcagaaggattactcccctcccctcgtccccgccacccctcccccagccttccctnnnnnnnnnnnnnnnnnnnncatgtgcaaaaagaacaaaagggctcctaacaccagaaaaaaattcaagggccaaacatactcactggtactctcgttccccagctgaaaagttctgaattcatacagttgaatccttcttaacagtctgctttacgggaacctttatcaccgtcgttccccagctgatgagttctgaattcggcagttgaatccttctcaacagtctgtgttacgggaacctttataaacgtgatccgcagttctggttccggaatgagggatcttccctgcgccagtcccgagtttttttctcgtcccggattttctcgtcccggaattcggcaccaattgttattcgacgcgttctcacgaccggccaggaagaacacaacaaccagaatcttctacggcaaagctttattgcttacatcttatggggccagagtgtaagaagcaagagagagcgaaaagcaagagagagagaaaacgaaacccctttcctctttaaagagaacaacaattgcctcggacgcatcactccctgattggctgcagcccatggccgagctgacgttcacgggaaaaacagagtacaagtagtcgtaaatacccttggctcatgcgcagactatttgtttaccaacttagaacacaggatgtcagcgccatcttgtgacggcgaatgtgggggcggcttcccacattttgcaagccaagaagtggagcctggaatagatctttcctgagggctctttaggggcaagctagatgacacctggacttgggacttctgagtctccaaaactgttagtacatgtgttacttttgcccgtggtatggttgcccatgctaatgagcaaataagctgtctggatggttggttcttagtgacggttgctttgaatgtcaacttgccacaaagtagaatcactttaaagggagccttacctgaggaagtgtcccgatggtcttgattggtgtaggaaggtccaccttgactgggtggcaccttcaggtaacaggccagataaaaagctatttcagaaggattactcccctcccctcgtccccaccacccctcccccagccttccctcttgacaccaacttggtttgtcactgctgccgatctcttccctgctagtagacccagcgtttccaagtatctgctgtggactagggaccactggttctccaggaacttcctttgcttcccgtagcagattgggactactgagtccacaccttgtgggctgagttaactactgcttgtcacctgccagtgagtgagtggggaagcagaaagtgtggtcccacgaggaccgcattgtaccacgggaacctaatgggcttgctgatttattcaagcagaaagctgaagtctagggagcgtgtgtgaccatggacttgaagggtgtgggatagtggtagaaggaacataaagctgaatcagtctgagtttgtcaatatgagcccattgaacagagattctagatttactattaaaccttgcaccgttccaggaaaaagacaaaggtaccaagagtttatttgattggttagttgaactatttggaaaaaaagatggcctaatgggattgggcctggtattccttgttttagtgtcgataaagggatttttaaggcatagggaaactggaatactggagcagatttgttgcttaaaacctaatcctccagaatgggcaggcccagaagacacacccttcactaatactttttaaagatgcaaatggtgagaggggtgccagcacatttgaagagctttgttgttgcccttgtccttgtgccagatcttagggttggagatgctgctgcacagttggatgtattaaacttgatgagctcaatgggagcccagagcagtaggccaggaagtagcatagaactgccaaaggcaagatgaacctgcttatcaccataatgggcatcacaggtaaaacaaggcccataaaggcctgtgtctcagtttgggtttcaattgctgcagccaagcaccatgaccaaaaagcaacttggggagaaagggtttagtcagttaacacttccagatagattatagttcatcattggaggaagtcaggacaggaactcaagcagggctggagcctggaggcaggagctgatgcagaggccacggaggggtgccgcttactggcttacttcccttggcttgctcagcctgctttcttacagaacacaggaccaccagcccaggggtggcaccacccacagtgggctgggccctcccccactgatcactaattgagaaaatgccttacagctgggcctggtggagacaacttcgcacactcgagactcttacccgagactcttgtgctaagttgacacttaaaagcaaccagtccagcctagcccacaaagggcagtgcaaggcaagtgagttctagatgacatggacctttgggactgggaagtcaataactgtgtttcctaggatgaaatagatatgtttaatatgtttgtgtagaaacaaagggaagaaatcttacattgggttgcagtaatggggattcatggcccatcagtcagttttcagagctgaggcagtttacagacccagaaccccttggatgaagggaagactaggtctcccgggggcgggggggggggggggaccatgctagaagaactaagagatatgctctttaagaccctccttccccagcctctgtctgcttaactagcctgtttctatagctacatttaagccatagccacagtttcatgtgctgctaacattcagctggccacggtccacacttgggtgagtgggttgactgtgaggatctgattttgcccaggccagtggcacctggttcagagcagtaccgggaagggctatgcgtagttctacagctgtgagtgactctcagcaacacacagcatcagatgtgggtgactctcagcaacacacagcatcagatgtgggtgactctcagcaacacacagcatcagatgtgggtgactctcagcaacacacagcatcagatgtgggtaactctcagcaacacacagcaccagatgtgggttactcctattcaggccaggttaatgactctggagaaacaagagtcaaagactgtttttgtttgtgtgtttgattggttgtctcagtatataagtctgattcctttcagtcagtacaggctaccctgtcatcgttgaagatgttagatgtgggaaagtggccaattttttccctttgttctgaggaagagttacagttgattcgtcaggcttgtgtcttcggcagtgctggcaatgaagttttatacactacagtcaacgatgaggtaatttggaagaaaaaaattcaaccacccatatttttagtaatggatttgtaaattgaagacatccagggaaactaaggaatgaaaagcctttaaacaagtatggaaagtcaatttttatttattctgtgacgaggcagtttgctttaggaaggctgcctgaggtaatttatagaattctcagaaatggagttccttgaactgcctggtttgttttttttttttcccacagatttttgtgcttggcacaaactgcagtggctgtctgggggtaggcgacattcagagcactattgagcctcggagactggattctctaactggcaaaaaaatagccagcctcagctatgggagtggccctcatatcgtccttgcgacaacaggtaacagaaactcaaaggacaggtttgaagcattgcttatttgttaagaaataagaccagtatgccctgaaattgagagcaaactctctgattgagcaagagtggctggctctgccctgtgagcttggccacgcgttgggcaacatgaagcaggacggttctggagcaatggggcaaggtggtaggtaacacacggggcctaaacggctgcaagacgatgcacaaagcccttctgttctcagagtggaatcattgcgtgacaacgctacttattttggagcttaggaagcctacactttgaacttagattcctgggctgggaactgagagaccaaatgttcattttgccagccctctaaatcttagcagtctgtgcttctttcattaagtagtggctgataggagaagtttgccttagcagtggagcgagaacagtctcttggctacgtcaccagaatttaatcacgcctttgagatgtacattccaggaccttgggaggggatgccaggataggcccgattattcagaccatttcttagttaaaaaacgagctcaagcctgaggctggagggatggcttagcagttaaggaaaggtgaagtcaggtaaggatagggtcaagtaagggtagaggagacctataggctgttctgctgttgagacacctacctgcctagctgatgctgagctgtggtttgtacgcttgaggtagagggttacaggttacaggtagctggagtgtaataggagacttcctataccctgggactgcaaggccagaccctcagcacaggattggcctcttcctaagggttgaacaggagactttccttggtgaattccaggaaggaaaaggagaagagtgagtaaaaccatccctgaattcgcagctatagatctgtgtcacattagactgaatggtctggggagtctcaggccatgaagtatattaagagtgtgatagagattcatgcagatcctttgtagcatgagttgcctctacggaagcctggaaggatcatcagaggcagcttttcagtgttagtaagccacatgtgatctaagataagcagttgtgggcactaaggcaccgtggctgtggtgaaagacacatccttgtggcctttccttgctgatttagagtcggccagtacttctctccattaagtgcctgcttctgtcagctgagcagaggggtggggtttgtacggaaaggactgaagtctgcaggtggcggacactcttctgtttgggaacgtggctcctgctcttccctgtcttggtctctctggtcagatgacagcgtagccttgcttgctcatgtggaaaaggagcatgcgtgagcactgccacacttgggttggggacagcaccagagctcagtccaaacgccaacttcctgtaaagtctaaacacatgagacctggtagaagtagtggacaggtgattagtaaacatgagctgttagaatatcagacaagatggcagaaaagaaaatatctgcagaggaaaaaagatctacatcatagaagatttggaaaagacccagtaaacaattattgtcaagtgagccttgactggacaaattctatagcagtttgtataccacaaaagaagaaaatcaaaccagacaatcagagaaagccactcagaatacagcctatggaatgtggtagaaaacacagggagcacacatgtgattgattcattcaaagtgcagaatcagaaaaggaagtcattttgtggaaggtgcgcatatcgagggctttggggaaacacgctatgttttggcctgagtagtatgtgggtgttatgatttcttatccataaaattgcacattttatgaatttttataattgtatgagtactatgataaattttaaaatgtggtcatcatctctaaaggaagtgaagacccagaagagttaaggaacacctcgaactttgattttcgctctttacttatgcagaaaccaacgtctagctctagattaactttatgtatttcaattccaccatattgcttggatgtggaaagcagtttgtgtctccaagtaggctccctcaggaggggaatttggaagggaagccaagcatcctctgcagctgaatggtggattccatcgatggcaatccaggcacgggttgtcctgtcctatagagaagcacaggccgtgacggctgcttaccttcttctgttttcagatggagaagtctttacctggggtcacaatgcttatagccagctgggcaatgggacaacgaatcatggtttagtgccctgccatatctctacgaatttgtcaaacaaacaagtcattgaggtcgcctgtgggtcttaccactctttggttctaacatctgatggggaggtgaggataaccagcccaagccgccgacttgactttctctctttctctctctctctctctctctctctctctctctctctctctctctccttttgtcaataggatctatagattcctttaactacccccaaaatgtgattaggcaatgaaattgaatgtcattatcttagtttgctttgtactgctgtgataaaacaccatggccaaaagcaacttggggaagaaagaggtttttgggtttttttttgttttttgttttttgtttttttttttggctttcagtctacagttcatcatccagagaagtcagggaagaaactcaagacaggaacctagaagcaaaaactgaagtagaagccacggaggaactctacttcctggctcgcttcccatggcttgctcagcctactctcttcacttgatcttagccaaaaggccgagaagcgattcagcctactttcttatccctcgcaggaccgccaagtcaggggtggcactgctgccagagaatgggccatgccacatcaatcattaatcaaaaaataccttacagacttgcctgccaccatctggtggagtcattttctcttgagtttctctcttctcagatatctctagtatattagtcagggttctctggagaaacagaacttataaaatgaatctatctatctatccatctatattcatctatctatctatcaatcaatcatctatcttatcatcgcacacacatacacacacacacacacacacacacacacacacaaaatggaacttataggctatgtaggctatagttgtacaacaaagactgtttaccaatgaaaggtccaagaatccagtagttattcagtccatgaggttgcatgtctcagctgggctccagtatacactggaatcctgaagcagactctaatgccagtaaaggaatggccttggtagtgaggcaagatcaagtaggcaaagaagtaagctttcttcttccatctcctttatatcggctccagcagaggctgtggtccaggtcaaaggtaaatcttcccacctcagcagatctgggtaaaaggtggaccttctcacttcaaatgatttaatcaagtaagagtctctcacagctgtgtccaaccgtttgctttagttaattccagattagtcaagttgacaaccaagatccatcacacctagcttgtgccaggatgtcaaaaggtaaccagttatgctgagctaagcagagatatttaactacccacctccctcaaattcagctttattcttggtagcaatttattgccatggtggttttattatgacgtttccttgtatgtagtaaggacttcaatcactacaaatcttaaaagggcccattattacttttatattgctgtaacaaacatattacttacaaaataccaaatctcaaaatgttgaaaactatggctgaggtggagaggtagttttgtgtcatatgatagttttacaagtgttctgtaatacgttctctgcctgtactggggacggtgagggagctccctgggagggtactgaggtgccctgagcgctggtcagtgtccagtagtggcagttatgagtcgttcgctttgtttatcagtcttttctttcccataggtgtttgcctggggttataataactcagggcaagtaggatctggatcaacagctaaccagcccattccccgaagagtcactggatgcttgcagaataaagtagttatgaacatagcatgtgggcagatgtgctccatggctgttgtggacactggagaggtaggaaagttgtttcatacttttttaaaacaaagttttctttgcctccgtagtgtcacataagcatggtgtgctcctcacaacagaactgagctgctgagtgctgacttgcctctctttcaccaggtctacgtctggggttacaatggcaatgggcagctgggcctgggcagcagtggcaaccagcccaccccatgcagagtggccgccctgcaaggcatccgtgtccagcgggtacgtctcctgggggggaggggggtggcggtgtaccagagccgagtgtcctcatgcacgttcagctgctgggatgcttctgctgaagtaaagggaaagccttcccctgaactaagatcttcagggagatgctgtgtctatggtcctggtgtgtgctgtcctggaaatgtaggcttcacaccctttcctgtagcgtcttggacaacatatacaccaacagttttaaaaatcttcatgcctcttggcctgtagtaagtctacttttagagaattgtcctaaggaaccaaagaaagagactcttataaaattagttaagtcacaataaaattcattaatatatataattaatatgcattaaaagctacaattttaacaaaggaattttgggggagagaataaacaaaaactgggtaagatgaatgtaagaaaaataatttactagtcaaatgaacaattagatagatgatgctgttcaggaggcagtctcacattagctcaggctatttttatacttgggttccccagccttctaactacagagattataatctgtgttatcacacccaggttacaaaggacttttaataatagggagatcgcagtgtaataaaggtgttaggttaaaaagatacaaggtagctacatatatatgctaccacttaaaaatgtctaagtgcatatttctatatctgaataagtaggaaaaaatgatgttgatccctgatcatgccgagccctgatcttgaaagattttcatgtttacacgtttctccattttccacattaaacgttttccttcaagaactagaagaaaggattaatgcgtctgtcttacactgggctcattgcccttgttttttataacagtagtgaatgctgttggagagctgggtgcagtaggtgagccagctgaagaactggggttgctatctgcagcgctggccattcggctgggtctgtgctcgttcgaagagtacttgttaatgtagtggtggcctttatgggcaggctgcctgcccttggttttcagttcagttcttaacctactctgtagcagtgatgaaacatttccctgttacttgtagacttgacttttttttttgtcctttcaggttgcctgtggctacgcacacacattagtattaacagatgaaggtcaaatatatgcttggggtgcaaattcttatggccagttgggcactggcaataaaagtaaccagtcctatcctacccctgttgttgtggaaaaggacaggtaatgtgtacatttccaaatcgcctcagtcgtctctagtaattaaacagctcttggaattcatagtgtagaattgtgggaaagtactcttatcattagacttgtctttaaccagattgttcattcctttttaaaagttgccttgttgccaggcagtggctcacgcctttaatcctagtacctgggaggcagaggtgggtggatctctgagtttgagaccagcctgctctacagagtgagttccaggacagccagggccacacagactctcctgctgtcagctccctgtatgtcatttgtaccccagtgctgtcctgtgcagactacagtgactgaactgtcactcgcagttctgtggctgtcttgtaagtgctttctccccttgtttttttatttttatctttaagaagaagctggtaatgtttgacgtctgccttctatagcttggggaaacgatggtactttgtagagagctaatctcccagctacttataaaagtggccagttggaaggaagggtgattttgttgtttgaacttccaaactattgccacgcagaggagtgaagtgttagaaaatgagaattcagttttatgaactgacgtaatttccaaacgatcctaatgcttgtgaaagcttctggcttctttggatagtcacgtaactgtcttttccatcatctgactcagtggtatgacacataaacatcacactacttcccctataagccagtgatgctgtcgctctagaagttaatgtgctcttcccatttttatcccacatggtatttttttatttgatttaaagtgactacatgcataaatagagtgctggcacgtaggcacttctttcatcttttttccattggaattcttaataaattatcattttatgtacatgctgtaaacatagtcttttttatttttgagatgtacattttatttattttttaaattttaattttatttgtaattcattttttatactacatattccattccccgcccctccccatccaccctctgactgctccacatcccacacctcctccccaccccaccccgtctccacgtagatgcccccacctcccaccccacctgacctctaaactccctggggcctccagtctcttgagggttaggtgcatcatctctgaatgaacacagaaccggaagtcctctactgtatatgggagcctcatatcagctggtgcatgctgtctgtttggtggtccagtgtttgagagattttgagagtccagattaattgagactgctagtcctcctacaggatcaggactgcccttctcctcagcttctttcagtttttcctaattcaacaacaggggtcagctgcttctgtccattgtttgggtgaaaataactgcatctgactcttttagctgctttttgggtctttcacagggcagtcataatagttccctttttgtgagtgctccctagcctcagtaatagtgtcaggccttgggacctccccttgagctggattgcactttgggcctgtcgttggacctttttcctcagtctcctctccatttccatccctgtaattccttcaattatgggtcagagatgagactatgggatgacaaccccatccctcacttgatgtcctgtaagttctctctccctactgtcaggcatttcatcaacgctccctccctctgagtcctgggaataacatggtcaatcttatataacctatatagatctgtaaaaggagactttttaagttaagagtttgaaaataggacctttgactccttaaatggggaacaggagagatagtggaggctgatagttcattgctgaactggtgtagtttccaaagagatcaatgagaacggaagggatggcttaagactgtaactataacaacgccttagaccgccagccagccagccagtagacactttgtaccctgcctgagcagtgttgctaaaggtcacatggaggcagtaaggacagaaaggtgactcaccagcccttccccagggtgcttctgcactcaccttagcatctccaaatagactggcttggactgccctgctttctctgatgaagaatgagagcacatctttccactggctcactctggagcagactgtgggccactaaagtggaggagagaacaggaagcagagaagcaatgaaggggaggatggggtgcccgtagcttccgggctctgagcatcctgcccagcatccttgacagaaaccctggggtttctcctgtgcacttgtgcgcttgctggtgtccacacaagtgtacttggtaatgcaggatggatattctgaaaggaccatcctgctctctgtagtttcccagcattgtccttctgagcttacacagcgtcaggcaggcctcggtcgcaggcctgtggcaagaaagaaatgtgtaatctgctaggacttgttccatacctccctgcccttcccagtggctaaggctcattcatgggtcatgactttcttcttactcttctggggctccttccagcgaagcctaattagggagggattgtatgggtggggcaggaggtgagtctatagttgttagtgcctgttcatagagaaagaaaaataaaacctatgtacactggattctctgctcaaccaaacgagacgcttttaaaaggtttggcacgtgtgtccttaagttgatcccataaaggcatattataattcattataatgtaaaattagccaagccttgaatttttgataattctgtggcctcttgaggtctttagtagtccactgggtggttacagaaccatgtaattccatctgggaattagattcttagtctttctgtctcatagaatgctagtgagagttgagatgtctgagtgcttaacaaaacaaagcagcagcaacaacccccccccccttttattagctgcttagctctctgtatgtggagttcactgcagcacggcttcagccatgcagtacggcagggccagagtgttcagggctctcattgcagggccgagtctgactcctccttggctgttcatccaggttaccctgaagatggggcttagctgaagcagtgtcctgccctgggtcctcccagctagctcccagctgtctgtcatgcacattatccttagaacactgtcttcttacctcacctccttgtccagagctctctcccacttacctgtcacatcagctcaacactgcgctcatgggcctttgttgtaagagacagcatggttcctagcaaagcccatggcttacttgcccctacactgagttgtctgttccagatagaagctcctatcagtgcctctttcctgtcttactatgcctctctgcctgtagcttggctataggttttcctctgcctcacaggctctgtgctcctctgacaaatccaaagtctgtcagtcccagtagctcccaggtctgctgtcttacccagcagagctggtagactgctatactctcatttgctgcttctctccaggtggaagccgagctcccagtctggcccctgcagcacctgtttgaataatgttagtcatggaacaagctgcccttgatgcctcagtctttgggactacctcatttcattgcctctgggacagtggctgcttggtagcctgtaccctgtctataagttatgcatttttctctccctaccttgagtttttttttttccccttaaaaatacaataaagccaggcagtggtggcacatgcctttaaacccagcacttgggaggcagaggcggaggcggaggcagagacaggcaggtttctgagttcaaagccagcctggtctacagagtaagttccaggacaaccagggctacacagagaaaccctgtctcaaaaaaaccaaaccaaaccaaaataataaaactgataataagagtataaatgatatggcttatacagactacttttgcctcagagctagtgttgtgcccaaaccaggatgctctgatgaccgccactgaggcccttatgtcttctgtgaggtgggagcagtgggcacattttccttctagtagatggattttattggctgtttccatatctgctgaaaagcatatacttagaaaaccagatcgtttgggccattttctcattgtgcagggccattccacagagcaccagctgtgggagtcagttccttgatccaaccacacaaacgttaggagagattagacaaggtctgccaacccaagtgcatgacccaaatacaatcttgtgtaagaggcatttcactaaaagctgtgcagcgatgagttaaccaaactgccagacgtcctggctttgccctgacccatgaggctaaaagtcaaagtggaatcttttatgctacatttccagtcatggatctgaaaacgagttatttatccaacctcagggatcaggattagtccactagccacacttcccaaacaggcctattgaaatcgcgtgacactgaagttccctgttttaatccttacacagaaagggtcactcagctggtcactcatttccctgcggtttcgttgaaccgactgacagtctctgtttctgcttatttctttcattccttctgtttacacccttctttggcttagcccacttcatcttgtggcatgagattgcccaattatagacgtgaagagagagagcaggaagttctgatttgcaggagcagcatagagtggaggccctgctgtgctgattgctgtaccagacactgtgcccagcacatatggggatccactcagtatatcgcatccttttagtgtgcagaaggccaggagccagcagggtaaggcatcctcttggcatgcaggaggcctggaatcccttcagtagattctgtcagcatgcagaagtcccagggttgctctctggcattaaaacaacaaactattgagttcattgtacagagcagaagccagggtgacttttcagccctctccttgtaaagtacctgatggtttggttttggtgacagggacaagcccagggcagttttcctgctgagctagtttatgtatagaaccccatcctaccttgagattttatgcattgacccaggtaagatgatccatgtctttatctagttagtaatgcttttaagggttaaacattgcatgtttgtttgtttgtttgtttgtttgtttttctagacagggtttctctgtgtagccctgtgtagtcctgaaactcactctgtagaccaggctggcctcgaactcagaaatctgcctgcctctgcctcccaagtgctgggattaaaggcatgcgccaccacgcccagcttaaacattgcatttttaactcaaagtaagatggcatatatttttaagacctactggtaatcaatagatcctcatgttataaatgccaccaaagtatggttccagcatttggtggctgaaagtttaggaagtgagttgtccaagtcttgctttgttctttctgttccttgggcctatccacctctgtcagctagttagtcggcacagtctgagtcaagtgcactcggggaaggagaggccagctcttgtcctcctgttaatgtgcctctgtggcatttgcttgtgaatttagaatcatagagattgcagcctgtcactctgcccacacatctgctgccaagacacaaggtgggcacgtgtacatgtggggccagtgccggggccagtcggtgatccttccacaccacactcacttctgctgcaccgatgacgtgtttgcctgcttcgccaccccggctgtcacctggcgccttctctccgtgggtaagcttgtcctttccctcttgggacagttctgagaacgaggaagaggaaggtacttttgctgtgcgaccttaggacttgggtacaggatctaatgaacctctttctgggagcccttggggaggggaactaaaactattggaaactaacacaatactaattagaggtaatttgatttgattgctttcaatctgaaagctgtctttcagataaaaaatatatctagaaacagtctagacattcggacatcttaaatctgattcagttagtgaaacagttgggaacatttttggctttggcaagtttacaatgaatgttcaaaggcgtgaatccatacccagaggcaaaagccttgtatagctgtcagttgtttgggggattcagcatttctggaatgcccagcgagtaggggcctcctccttgccgtcatgttcaactatgactgaacccagaagcactgtgttgctttcccttagaacctgacgaccacctcactgtggccgagtctctgaagagggagtttgacaaccctgacactgcagacctcaagtttctggttgatggaaaatacatttatgctcacaaagtccttctcaaaattaggtaagagtgggcctctgtgggcaagagtgtctaatgatccctgggacccagatggtgggtaggcagatagagctggctcccattcatgtcctctacatgcctgctgttgtgggtgtatgtcacactaaatagatgtttaaaataattcgtaagagctggtctcttttgaggagtgaaattaattcatttatcaatcacttcagatatcctgactcttgagtaagggaactgtgccagacacttgagtaattaagaggcagctctgatgaggctgtttgtgcccttaaagcacacagtgtcaatggggtaggagtgggggaatgagacaagatgtggaaggcaaggtgggccacaagtactgggtttgttcagggaataagccatggaagttctggctgtagcttagtgctgaataaataagttttgcccttggaacagagccagatgctctgatttaactttactgcctggggcctgaacacagccctgcagacagccctgcagacagccctgaacacagcactgcagacagccctgaacacagccctgcagacagccctgaacacagccctgcaggcagccctgaacacagccctgcagacagccctgaacacagccctgcagacagtcttgaacacagccctgaacacagccttgcagacagtcctgaacacagcactgcagatagctctgaacacagccctgcagatagccctgcagacagccctgaacacagccctgtagatagccctgcagacagccctgaacacaggcctgcagacagccctgcagatagccctgaacacaggtctgcagacagccctgaacacagccctgcagacagccctacagacagtcctgaacacagctggattcggatacagccatgctggagaaaaaaaaaagtggtttttccagaccaagaaggacctgggtgatgccaacacaaaaatgttttaaatcacacttcttacatttacatttataaatgtaaataaattacatttatttatgtgagcagtgcatgatattcaccttatctttgttccatgtcacagtctatgaagccaccaccctaccttcagatagaaaaatctgtccttccccaaagatcctaagtcccatactgagcagccaatgattttttcctttcatacacactacgcatgttctagaagctcatatgtatgaaattatatagcatctcttctttcctgcctgcctctttccttcctaacatgatgatctgggactgtgttgccactgtgtcaaagatattgaaaccctctttccgtgactcagaaacccaatatggtattttggtctcaagttcccattctgaaaggtcacatagtgccacctggttcactctcaccacggagcctctactttcacgaaggaaatgggggtttagtttactgtgacagagcaaacactgaacacgctcagcctacaccatgacaacgcactttatcatatgagcagtatggtgttttctctgaggcagggagaagaaccaggcctacacttgagcttgtggtggtctgtggcaatcttcctctttctgaggcatgacacgtagcattctccgagtctgcctgtgtcccaggcttctcctttgtctgattgccttggggtctaccacagtgacttggcttatgatgatttttgtaaagagcctgtcttcacataagttcacattgtcggttactaggaacttttagggacataattcagacagaatggagtaaagagacataattaatcagttataaaaacaatacttatcagtaaagacagtgtgagaaggaggccagagatcccccgtctcccccagtccagcaggctgcattgtaaagtcagctgctgggccgcccacagcagcagcagtaggctgcaatgtagagtcagatgcctgggccacctgcagcagcagcagcagcagcagcagcaggctgcatttgcagtcttgccgattaggcaattgaaaagcaaggagccaaggcaatgacaaggtttttggcagtgttctgtgcctgtacgaaaatgcctgagataagtaactgacataaaggttatttgcttacttggtgcggctgaactgtaactccagcttgaaagcttaccctggcttggggttgatttggaggttttgtttggggcctcctgaaaagcaccatatcttggtgggaactgcctactggaaccaccctactactgtcacaaatcaggggtcaaagaggagcttggtctccataagtccccttcagtgcattgccccagtgatagaccccacactaagttcccttctctaaccctacctcttaaaggttctaccacctcctattattgctaccctgggaccaagttttgacagactagcaaacaggaaaggtatacagcttcaagagaaagtcctcaggtagtcccttgactccagtctagaacctgggctatgatcttcctttcttctttcaggtgtgaacattttcgttcttcattagaagacagtgaagacgatattgtagaaatgagcgagttttcgtatcctgtgttccgagctttcctggagtatctatacacagataacatcagcctatctcctgaggaggcagtaggtaatcatcagagaccttaccaccaagttggcaaatgttgaataattaggaaggtggcttctttccaggccaggagacagacactgcgatgtttgcaggagctcttctggtgatgttgagcctgcgcttttctctttttggtccttggatgtagcatttgccttttctcagactctgccactgagctacaccctcaggcccagaacgcagacttcccttgtcactactacatatgaaggttgagtgggtagctctagtaagaggtcaacatcgatcaccactggagcatcacaggcaagcatggaaggaagggcagatggcgaatcttgtctgtgaatgcagagccctagaagatctctttgtcattgccccagagtagatcaaggccatgtctgctacactcggctgtgaaagtgggcattttaggtaactcagttaaacatttcacaatctgaaatctattatataggtaatagattttttttttcatttggagaaatcaatgaataagaatgtgagggttgaagaccaggtcatgcccagggaaaatagcctagccaagagaacaaaagaagagccactgattaaagagaaaagaaacattagcaagtaacagagtgcccggggtcagagcatgtatgtccccacagtacactctgggtgagtattgaataagaggactccagatcagtctttgaatttggcacagtgaagcccatttatgtgtgggaagactcaaccgtggggcagcttcagacagtggcaagtgagagcgacagctaatgagactgctctctgagagactgctctccaggagtgatgctgaagcgaagcggggcagaaagatgggttggaggacaggaggcagatgtgcccacgacaggggattcctttgtgttatctggtgctggaactgaaggcaggcttggcctgctgagcttgtgcactgtgtcactgcccactcccaacccaaccggctttctttttaattccgtgacaacatgtgtgctggtgggcgtggcctccaaagattctgctgacccaggagaggggaattcagagaaacacaaacctgtttcatttctaggaaaaattattcaagccattctgatgttaactcctatccgttgtcagtgtcagctcagctcagctgtcttcccggggtgctgtgaaggcggcttcagagttgcagagctcattttgcccgacggatggaagcccttcacagccctctgagcactgcacctcaatggtcaggcgctcagagcgcacccacaatacattctcctttccatcagggttgctagatctggctacattttacagtgagactcggttgaaaaagctctgtcaacaaactatcaagcaaggaatctgtgaggagaatgctattgctctgctctctgctgctgtcaagtatgatgcccaggtaagaaaagcatcttccagtgagccactaaaagtaacgtgtagctagatgaaaatggaacatacagaaataaagtcttagagaacttatgtgactataatggcatcaaacgtgtctcaggaacattagaagaagacactgtgaaaggccaggagacctaatttccagtgattaaaatctttctacatcaagcatgaaatgactctcaggccgagcctcacagtgtgagttcaggacccacatatggaaggagagaactgtctccaaattgtccccgagctccatacatgtgctgtgacatgcaccatggacaagctccatacatgtgctgtgacatgcaccatggacaagctccatacatgtgctgtgacatgcaccatggacaagcacacacacacacataaattcacaagtaagttaaatgacacattgagaaaatgttttcataacatacaataaagcaagttcttcatagaaaaaaatgaaaagaaaatatgggcagtttgactgggagaaaaatgaaccaaagaacgaatggcaaacataatgaatgagagaagcaggagatgattctgtccttaaagagcacatactcgcacggggcgatcagacgtggtttgtatttccttctccttgctctcttcctgaactttctgcagtggctgtgaattgtcacgataaagaaaggaaagagccttaatttagagctgaatcagtaggaaacaggccatagctgcttggagtcagcttcctcttggcataggatagcctccctccccactgactttaaaaaatagattagtgagggagactggtaaagacggagtgcccttttcctttttggtaaacagtaacatgcttatgtaggggattctaagtctgcggaggaaacaatgcagggagcagactatatgactgttctgtccatgggcctggctgcccccagcaccccagggcagagctcagtccgccttcctttactttctattaaaaactttgttttgtggttctacacattgaattttagacctttgtactagccaggcaagagctgacctctgagctagatccccagctgtcttgtttattttgaggcagatctcactagtccaggtttaaccttgaacactttgtagcccagacaggtttccaacttgccattttcttgcccttgggctcttaagtgtcttgaaaaataggcctgaaccactaggcctaacttgtatatatttttaaattcttaaaacttgtatttttaaatacttgaagtttcatttttcattcagtatttaaacaaaaccaaaacaccatgcaactgtatccacatggagtaggctggctggtagtagggaatgtccagtgaggtggctgtgtccaccagtaggtggtaagggtagccccacccaggtcgttggctataggaatgttgaaaagtgcttggattctaactatacttgatgtcttagatgtgggatggggatggggaaggctagattaacgttcatgtcaagaattttgggctgcgtaactgaagagatgaacagtcttactgtgtgatggagcgtggcaaggagcacccagtcagtcggctagggcgactaggagcagcattttaggagacacactaggaatctggtctcaagggtctgtgaagcatgcagaaaagacatcagtgagccagtctgacgtgtagagagaagtgtcctgagagctgtaagaggacactagcaaaggactctacagaagtaccatgggaaagccacttttaatgttgaatgaaaagtgaaatttcaaatatttagaaatacacaattcaggacaggtgtttcaggagttgagaaaaatccttaaatacgctgaagctctagtgagtcaggttgcatgctgtgatccagtacgaaagctacattgttgcagtagagccctgcggaaaggcctgagagaatggaagcgaggaactggcaatgggggagccagaaacagcttttcctggtaattttacttacagatttaatgggaaacagattgaagggccggctgagataatcaatgcatgtttgtgtaaacaggacaacagcttgaaaagcaagctgatagggacagttgctagtgcaggtcctcaaataggtggggcagtgtgacctaatggtagagccaggaggtaggccttatattaatcatggaccattcactatgatacccaaagaggaatgtccacaggtttctagcaagaggcagaagtgaggggaagggctttatggagcctctctgagtaaagcaggaggcccattcgctcgcatagtcagggtaagaggaagtattggatgacgtatgagtcatgttccagaaggatgaacagggaacagaactaagagctcttattaaaaggtggctgtgtaaaacaattgcatttaagtagagaaagtgttagaaaaataataaagagcttgtcttatacagtcagaattctctgggaggtcagttctactctatatcaatttatttaatcccatgaactctttctgaattccattttaaaaataattatgggaaattcccagtccaaaaaccaaaggaggatagacctaagtggtagtttcttaggaacatttggtttcccagtcattatcaattctcctgactctggatctctaagacactgaagtgctcatgtccccacctccttagcatcagtcctggtgtgggtgggcatccctccaacattctgtagaactcaacctaagcggtgccactctgtcatgtatactttcttatgctgtctgctactgagtggctctcagggtatttggcatttatccagacagcacattcttgttgtcatgcagggacatgactattccgttttgtcttcaagagctcatgtggggcagaaatgtcccactgccactgagactccagcagcctgccagtctgttatgggatggcatgattacatttcccttgtgtagctagttttctttctcacaggggaaatctcctatgggttcgtgtacatgttggcatggctgtttatttttctgcattcatcttcagcatttgctagagtttacatacatgtatttagaggaaagactgtaataggcaatggacatgtataatttcttgggaactgttgggagctttatattttataaatagcttcaacaacagagacagaattttaaactttgaatatgaacaggtggtggtacctttgtgctgagtcagaccatacctgggtgtagaacactcccttagaaagcctactctgcccgaggatttaagccaattcctcagcactgattttatataaatacatgtatttgtattgatacatatgtaattctgtaaaaattactttggctctggagactgaacccagagcttcacctgtactaagcacacagtctactgcttagttactcctagttaagattatcaaaggtgaatgtgatgaagtccacccatcccacccattgtcctgcagagaaaaataaggatgttaatgacccaggcttactggcattagcagttgtcatgttgtccttttgtctataaactcttcacaggcagaagcatttaaaaacacaggggagggcagtgctgtgaacaagcattgaaaggggaggaaggaatgactggaaaaggtgctggaggatgcctagcttaggttcctcttttggaggaaaaggctaggcgtttggcctggctgcattggactcttgtgttatgtacactttcagaaacatggactaattgttaataattgctgtagctgtatcacgctaacattccctccttctggtcatctgatcctttttctgagagaaattctcttgccttgttgggctgcactgggaatataaactcatcaagctgttgttattgttcctaggacttagaagagttctgcttcaggttctgcatcaaccatctgactgtagtaacacaaacgtcaggctttgcagaaatggaccacgatcttctaaagaactttatcagcaaagccagcagagttggagcctttaagaactgatcctgaatgtggaaaagaatgcttaagccttcccatttcaccccagcaaagataaataaataaatgaataaatagtaattaccaaaaaaagccattgacgaacaacttctctgtaactaacagtgttgatgagaactacatctggccagattcttgtcttctgtcaaaaggctgtagtcagttctctctatctgcctaccccgagatttacagtagcaggcactgagggctccaactgggtatgatataccacatagaagctgaaagtgtaccagtgccactcttgtggggagtctccctctcccagcacgtgccaactgtaaatagctttgtgggtaggttggtggggactgtgttcacctcctttctctgaccagggatctgtctggtatgagcttgtacaggtctcttacatgctgtcagtctctgatttcatacctgtgtgtcctgttctttcagggtaggcccaatgcttatgagtaactcgctaacagctttcttggctctgttttgtgtgtgtgtgtgtgtgtgtgtgctttttgttttgttgtcacttttgttggctagttgtcttttttggaaagttgggaggttttggaagaggttgaagttgagaaagaagaagtatcatctaaaaaataaacattatagttaccatttcttcctttgagtcacctatggtagatatctgtggggaattgatagtttgctaatctggagaaatggttcagtattcagctggctgatacatagttatacaaggaatgctgtcatgcccacatttttagcctctaacatagtgccttatatataaaaggcactcagttaattcactgtccatcataagggtgccccaagaacagctagaaggttggaaaaggaataaacaaaattagaagtctgtaattactgatattcatattcttttagtttgtaattctgagaaacagtagctaatttagagcatattagcattcataaaatgccttagcaactacgttgtcaaaggcccaagggctacttttgattttctactttctgcattaacttctcataatggcattgttgaaaataaaacattaactttgaatgttacttctggaatcctatgccttatgtaattgcataaagccctttgcttttctttatattgagggtctctctatataagattgattataggtttttcttgtagctagctttggtttcttaaccaggcactagtaaatactagatagaaaggaacacatttcatgggtagcattgtgatggagaaatgagtttctagaccaaaacaagccattgtgtagcaaaagagaaacaaactgaacaaaatgtagcactggattccaccaagtgtctcacaatatgatactatgttaaggaaatctttttgaaaatagaaatcttattctcatgtataattatttgataataaagaacttgatagaacaaactgccttcttaaattgttgagtaacaaaatcaaagtatcaaacttttgtctcacaggtggataaaaatcccttttatgatctgtacttattaaaagcagatattcagatgtcttatagcaaagttgactctaagatataaatggttcctattttttaaaggcca

SEQ ID NO: 470 - DNA, 3661 bp, Mus musculus
tgaactctctcctcctcctctggtttctcttctcgctcccgcggccccctcctccccgcacggctgaactcgagctcagcccgccaggccgggccgcttcagggggaggcgccaagtgtctgctgttcttggccccgggcgagcagtccccgctgccggggagcggaaaggacgcgcggcgcggagtcacattagcttttttctggaagacagctttacaagaatctagtcggaccaaatttcgggctccagaacattccaccaaccagcttagcagattatacattcttcaggagctgagagctgataagtctcttcttcaccgtgatttgaaactttccagtctcagaaaagctgaccaagggactgcacaggactgatccatatggaagaagaagtgcctggtttctatggagaaagtggcaagtcagtacaggctaccctgtcatcgttgaagatgttagatgtgggaaagtggccaattttttccctttgttctgaggaagagttacagttgattcgtcaggcttgtgtcttcggcagtgctggcaatgaagttttatacactacagtcaacgatgagatttttgtgcttggcacaaactgcagtggctgtctgggggtaggcgacattcagagcactattgagcctcggagactggattctctaactggcaaaaaaatagccagcctcagctatgggagtggccctcatatcgtccttgcgacaacagatggagaagtctttacctggggtcacaatgcttatagccagctgggcaatgggacaacgaatcatggtttagtgccctgccatatctctacgaatttgtcaaacaaacaagtcattgaggtcgcctgtgggtcttaccactctttggttctaacatctgatggggaggtgtttgcctggggttataataactcagggcaagtaggatctggatcaacagctaaccagcccattccccgaagagtcactggatgcttgcagaataaagtagttatgaacatagcatgtgggcagatgtgctccatggctgttgtggacactggagaggtctacgtctggggttacaatggcaatgggcagctgggcctgggcagcagtggcaaccagcccaccccatgcagagtggccgccctgcaaggcatccgtgtccagcgggttgcctgtggctacgcacacacattagtattaacagatgaaggtcaaatatatgcttggggtgcaaattcttatggccagttgggcactggcaataaaagtaaccagtcctatcctacccctgttgttgtggaaaaggacagaatcatagagattgcagcctgtcactctgcccacacatctgctgccaagacacaaggtgggcacgtgtacatgtggggccagtgccggggccagtcggtgatccttccacaccacactcacttctgctgcaccgatgacgtgtttgcctgcttcgccaccccggctgtcacctggcgccttctctccgtggaacctgacgaccacctcactgtggccgagtctctgaagagggagtttgacaaccctgacactgcagacctcaagtttctggttgatggaaaatacatttatgctcacaaagtccttctcaaaattaggtgtgaacattttcgttcttcattagaagacagtgaagacgatattgtagaaatgagcgagttttcgtatcctgtgttccgagctttcctggagtatctatacacagataacatcagcctatctcctgaggaggcagtagggttgctagatctggctacattttacagtgagactcggttgaaaaagctctgtcaacaaactatcaagcaaggaatctgtgaggagaatgctattgctctgctctctgctgctgtcaagtatgatgcccaggacttagaagagttctgcttcaggttctgcatcaaccatctgactgtagtaacacaaacgtcaggctttgcagaaatggaccacgatcttctaaagaactttatcagcaaagccagcagagttggagcctttaagaactgatcctgaatgtggaaaagaatgcttaagccttcccatttcaccccagcaaagataaataaataaatgaataaatagtaattaccaaaaaaagccattgacgaacaacttctctgtaactaacagtgttgatgagaactacatctggccagattcttgtcttctgtcaaaaggctgtagtcagttctctctatctgcctaccccgagatttacagtagcaggcactgagggctccaactgggtatgatataccacatagaagctgaaagtgtaccagtgccactcttgtggggagtctccctctcccagcacgtgccaactgtaaatagctttgtgggtaggttggtggggactgtgttcacctcctttctctgaccagggatctgtctggtatgagcttgtacaggtctcttacatgctgtcagtctctgatttcatacctgtgtgtcctgttctttcagggtaggcccaatgcttatgagtaactcgctaacagctttcttggctctgttttgtgtgtgtgtgtgtgtgtgtgtgctttttgttttgttgtcacttttgttggctagttgtcttttttggaaagttgggaggttttggaagaggttgaagttgagaaagaagaagtatcatctaaaaaataaacattatagttaccatttcttcctttgagtcacctatggtagatatctgtggggaattgatagtttgctaatctggagaaatggttcagtattcagctggctgatacatagttatacaaggaatgctgtcatgcccacatttttagcctctaacatagtgccttatatataaaaggcactcagttaattcactgtccatcataagggtgccccaagaacagctagaaggttggaaaaggaataaacaaaattagaagtctgtaattactgatattcatattcttttagtttgtaattctgagaaacagtagctaatttagagcatattagcattcataaaatgccttagcaactacgttgtcaaaggcccaagggctacttttgattttctactttctgcattaacttctcataatggcattgttgaaaataaaacattaactttgaatgttacttctggaatcctatgccttatgtaattgcataaagccctttgcttttctttatattgagggtctctctatataagattgattataggtttttcttgtagctagctttggtttcttaaccaggcactagtaaatactagatagaaaggaacacatttcatgggtagcattgtgatggagaaatgagtttctagaccaaaacaagccattgtgtagcaaaagagaaacaaactgaacaaaatgtagcactggattccaccaagtgtctcacaatatgatactatgttaaggaaatctttttgaaaatagaaatcttattctcatgtataattatttgataataaagaacttgatagaacaaactgccttcttaaattgttgagtaacaaaatcaaagtatcaaacttttgtctcacaggtggataaaaatcccttttatgatctgtacttattaaaagcagatattcagatgtcttatagcaaagttgactctaagatataaatggttcctattttttaaaggcca

SEQ ID NO: 471 - protein, 549 aa, Mus musculus
MEEEVPGFYGESGKSVQATLSSLKMLDVGKWPIFSLCSEEELQLIRQACVFGSAGNEVLYTTVNDEIFVLGTNCSGCLGVGDIQSTIEPRRLDSLTGKKIASLSYGSGPHIVLATTDGEVFTWGHNAYSQLGNGTTNHGLVPCHTNLSNKQVIEVACGSYHSLVLTSDGEVFAWGYNNSGQVGSGSTANQPIPRRVTGCLQNKVVMNIACGQMCSMAVVDTGEVYVWGYNGNGQLGLGSSGNQPTPCRVAALQGIRVQRVACGYAHTLVLTDEGQIYAWGANSYGQLGTGNKSNQSYPTPVVVEKDRIIEIAACHSAHTSAAKTQGGHVYMWGQCRGQSVILPHHTHFCCTDDVFACFATPAVTWRLLSVEPDDHLTVAESLKREFDNPDTADLKFLVDGKYIYAHKVLLKIRCEHFRSSLEDSEDDIVEMSEFSYPVFRAFLEYLYTDNISLSPEEAVGLLDLATFYSETRLKKLCQQTIKQGICEENAIALLSAAVKYDAQDLEEFCFRFCINHLTVVTQTSGFAEMDHDLLKNFISKASRVGAFKN

SEQ ID NO: 472 - DNA, 44292 bp, Homo sapiens
gccagccccctcctcttgtctgcgctcccttcgtttccgtctcggccgggcacccgagcgcatcccgccgaggccgggccgtttcagggggaggcgccaactcgtcgcggcgccgggcccctgaccgtgcagtaaccgctacccaggaggcggagcggacaaggctccggcctgcgaggaggtaagagggtggaggagtggtgtgggaggccgagggggatcgcggccgtgacgtgggatgctgtcaggtaccactggggcaggccacccctccccgcccctgcggcccgacctccccgccagagacagctgaggggcccaggggactagagccgcgaccgtgccacaggcctaggcgtcgtcgcgcatgcgtaaaactgctggcgggagttaagagctaggttccggggctacacccagcccaggccgcaggcagaggcggccctgcgcatgcgcaattccgctggcgtgggcccggtgcgctgctcgcgactacatcctgcccaggccgccggcccaggctgcgctgcgcatgcgcgagtcctctggtaggggtcgcgtttggcgtcgttccagggtgatcatctgctcggaggccgctctcatcctaagctcccacgtctggtgtggctgggggggcgtcacaggtcccgagggagcgtcctgcctgaagtttctccctcctaacccactcgctgcactgcatatgttgccgatgttttcatttctgtggcctcgacccctaggctcccgtcccataaatctagtaccccaggtcccgggcaccggcccggctcactaactcagtggcagtatatgctttcgacatttggtcctgatgtccaggaatagcgcgaaaagtttgactttgttaggcgaagccgttttggaactgcggagggatgggaagaaatcgccgagcgtcttaagccgcaacatagtgctctgctcagccctggaaatagaggttttcagacattgaaaactttccaagtgctccgtcttggcggagaaagaactgagttggaaggctaatttagaatgaactttttgcttttgttctttgcaaaaattacataaaatgttgcaacagttcgagaccaggactataacaaaacgcatttcatggagctactttgtaccgcgcttggcgacttaccttgtcagagctgaataaaagtggttgagttcacaaacagtgctctggatcgttgctctttcccccagacactgtttaacgtttattgagcctcctggctttgcaccttcctagtattgcgttcctgctgggttttacaccttactagacagtgggtcttagttaagtcagtttcgtgactcctggggctactgtgaagagtttctaacaatgtcattactctgtgctttgtaatcttatatgatgtgctgatacagatatttgggggctggaatagaagagccacttaggctcagagaatgagtattctaggtgaaacgtaatctctttatttcctgctagacagtacatgcgtgttattaagcagcaggtaaaagcaacaagaatgatacgttcttgcataccccacttccaccactcaggccttattgctcttgctgggctcgccaagcggaccctcatcccagggcgtctgcgtttggtatttccagtatgctcaatgctcactttcccactcttcgcaaatctgcatggcacagaactttatttaagtcttgaaacaattgccatcatttcagagaggtgactacctcacctaaaatgtctggctctccaaactcttgtactgctggttcggctttgtagcacttaatcaccatctgatattatatatttgtaagggtatgatcaatctatctccaccataattgaagctcagaaggtatttgttaattgtagaaataaaattggaaactaacttactccagagatatttttttactgaactcaacctagattcattcatttattcaacaaaaattgattttctatcacgtcctgtccttgatgcttgggatgcatcaatgaacaaaagagacaaagatcccttccctctggagcttacattctagcaaagaatgataaaaaacatatttgtatattaggttagaaaagtacaaatgctatgaaaaaatgaaaaaggagaacagagaaagggaattgggagtgcaggtgtgggttgcaattttaaacatcatgggtacggtgagtctgaaggataaaccaaaggtgatgtttaacatggggaactgggttttagaaataaatgttcttctgggagaaaacgttctttatcgtgctctacaatgtcttttatgggagcccacggcatgacccttgtgataaacgtcaccattttttatagtatataggtgaaaaaacatttttttcctaaataagagttcaaattattcaggagtttacagtttaacttagcacatcaaatgaagacactggacttttacaaggaagagctagccagacatctatgtaaattgtgctgagaaaaactgtacgttgtctccacagtttttgcaattgcttctaaatgtccctctgactgtggatgactagtgaagatcttttctaagaatggtcattgcttttctgtatttgaaactgtgtaggagaggagcttaaatcacctggtgtgatgttatgctataaatgacctctcttacaggtatctgaatgaaccagatagacctaactaaatttcaatccataattaaagaaggcttagagaaagagggtgatggagaggaataattttagaaagtaaagtgtgtttcccctcatgtcctttacttacatagattacaaatactctgttcaaacaccaaaatattattaatctaggaccataaatgtaaggagtccatggaatttgcttatgccctatgaaattgtcatattcaagtttggttttatcagttggttaaagtaaaatttaaatgccccaagatactgctactgttgaggtttacttggatttaaattactacaaatcaggccgggcgcggtggctcacctgtaatcccagcgctttgggggagaccaaggcagtcaaatgttcttgagcccaggagttagagaccagccgggacaacatggcaaaactctgtctctacagaaaaacgaacaaaaaaaaaatgagccaggcatggtggcacacacctgtagtttcagatacttgggaggctgtagtgtgaggatcactggagccgggaaggttgaggctgcagtgagtcatgatcacaccattgcactccagtctgggcaatagtgtaagaccccatctcataaataaataaataaatattgctacagattaaaattgtccaggaaaaggtagattggagaccaggaattattggggttacagagtgacattaaggactcttgttaaagactaaaagagagttctacttggagattttacttcaaaggagtggatggcttgcctcctggtaagggatattgataatgtccatcaatggaaggctgagatgatacttccagctttcattgtctggaaggaacatgtatctagttcacatggtgatcacattctaacaacgtgaaagtttccaggaaacttaaaccataataatttttcagcattaatttgacattagagtgggtttcttttacgtcttcagccttgctaattggcctgagctaatatctcttatgtatatctccctatggaagatgttttgagctaacaagtaccagtaggagatagtatgtgaataaaacataaattttgactgcattataatatgtcctgtattatgctgcgtgtatgtatgtatataatactgaacaaaaccaatctcaagtggaaatgagccaaggccaagagggcctgccatgttgaaggaatatatatgctgtgggtcaaagatctttaacaattaggatctctgtagcaggcgtgttaagatttttttttgaaaaattggattaaatctataaggaccgagatttaaaatggatttacaaatgagatctcaaatctcaactcacattagtgcatataacaacttaaaaatatttttatcatttatgttggttatttttcatatttgaaaatgacacttttgccgtgtgtggctgaaaagactgaagttgtcaagctcagtaatcttttcaattaaataccgctttgctttgtactgaagatctgactcatcactcttgttgaaatttggaaaactttttaaaaaaacaaataattaaaatagcaacagggtttctgtattctacacaacagttttctgtttttcatgaacatatgacaataccatttcctttgaggttgtgtgctagttttagttatgcttttagtgttttagttttgtccgtcctgtttataattgttccattttaattagccatgtaggtattttactgttacttgtcattgattttagacatctcatttaagtggagctaatattacagctaacactatccctttttgcaagtgaaaactgggatcatgttttattgtatacgtatttatattatttataacttgaagatgacccttaaaaagctattaaagatactatctaatgactcacctaaggatatatttgggaaccatcattatcctattgaaatttatgtggtctgcagctcattaacacaccgatgctgtaaactgcatgctggtaccctaaaagatatcgatattatttaatttcctgtttcttttgattataaaagcatcatcaaatgtgttacccacccagatgggataattttaagcatagagttctatattgagagaattctaaaaatatcagtgtgtttctcaagcatagctttagagttgatctcattaagttgaattttaaaatatgtaatactgggacttctctgcaggaattgctattttttttcaccccttcttctgtaatcacttctaaagaagaattattagcatttagaagcccctgattaactgcaaaatgtcagcatttaaaacctaccattgggttggggtaatgtggacagaagtccctaagagagctggatattgttttgctctacgttattctgtttgctctcatgtatttgctttcaattcagtgcctactgcaggcactgaattaatatttgttgaatgaattaggcaaatgaacctatgtcccataatcagcttaactcattttttaggtcagaggtattaccgagtaatataacacattgtgtagcagatacactgattaatactgattactttgccacaaataatatgtacagactgcctgttatatcttttgtacaggcaaatgaattatttgactttatgtgaggattaagaatgaatgtgtttatcacattatcaaaagagtgtccccttgttcagtagtcttcaactgtgtagtttttaaaagtgtagagaaaactctcaacatagaatatatagaaataaggagttatctgccccaaacagggatactttaaaaataaattagtgaaccgtacaattaggaaaacagctgaaataggaaatgtcatgtgacagattaccttacttgatatatatttggctttgaaacattacttttgtacagacttgaactactggccaccgagtgtcccatttggaacctttaaagacagagatcagtggcaggaacttctgcgtggagaggttacttatcattccattttctatttatattgcaaggcaaacattagtataataagattctgtaaaaacagttttaggttacattttaataaaatgaggaaataacataggagactgttttgcaaagaacaaagcaccttttattaattttcatatatatatatatcaatataaatatatatcatatatatatatatcatatataaatatatatcatatatatatatcatatataaatatatatcatatatatatatatcatatatatatatatatgagccaagtcatatatcccaaaacaaacatataagggaaaaactaataaagtaacacatagtaagatagtaagataatattactgtcatcctatagtaagatgatatgagatgatcttatgctgtaacactgtcactatgaagaaaatcttcccaatactgttgccagcttctgccttggctctacaagaaacattgccctcctatgcagaaaaggggggacatttgtaagcagatttagaccataagtagaaagcacatttttgccattttaatacactgatattaaacatttttttaactattttggatttttcttacaggtacaatagtataaatgctactcattggatatgttatttaatcctcctatttaaaaaaaatctatttattattattattttttgagatggagtctcactctgtcacccaggctggagtgcagtggtgtgatcttggatcactgtaacctctgcctcccaagttcaagtgattctcttgcctcagcctcccaagtagctgggactacaggtacacactcttacgcctggctaatttttgtatttttagtagggatggggtttcaccatgttggccaggctggtctccaaacttctgacctcaattaatcctcccatctctgcctcccaaaatgttgagattacaggcatgagccaccgcgcccaggctatttttattttcttagagacagagtcttgctctgttgcttaggctaatgtgcagtggtgcgatcatagctcattaaaaaaattatttattttttattttttgagataagatctttgtcacccgggctgagtgcagtggtgtgatcatggttcaccgcagcctccacatcctgggttcaagcgatccacctatcttagcctcccgagtagctgggactacaggcgtgtactaccacgtgtagctaatttttaagttttctgtagagacggtgtcttcctatgttgcccaggctagtctcaaacttttgggggcctcaagcgatcctcaaagtgctgggattacaggtgtgagccaccatgcctggccttcctagggtattgattcaattttattttacagatggctaaagaaattatagtttatgagttttcattaccaaacgtttattgaatttccatgtccttggtaaaggcaaaattagaatgatagcattctcattttaagagtttattttctttaacattgggtaaccttaatctctccatcctgagatgattaatttaagcttaaaatcttgaaaaccatcttgtcagatggaaaagctgtagcataccaattcattgacagagttacatgggaccttttatctttggtattccctccaccaaaacttccccacgaaaaaattcccatcaaagtctagccatgcatatgttggtatccataacacattaaaatagtactgtcttctgcatgttttaaaatgttatcaaatatcaaatgttatcaaatgataccatatgtatcattttgtgacttagtgattttggtgaacattgttttgtagatatacctgttttgattctagataatttattttaatagctatatagtatgcatatgccacagtttattggttttgttgatcaatttgttctttcttgctttttgctattgggaatatttgtgtgtatgctctagagtttatctagggcagtgttgctaaaattgcaggacttgttagtgatctggaaattagtgggctgagatcagcattttcttttaaaatgaaattgaacaagataaaataggatagagtagggtagaataaaatagcataaagtagaaaaatggaaaagatatcaagcatctcatgtaggaggagtaagaattattttgtgaaatttcagttatatatacatatataactgaatatatatatatatatatatatatatatatatatatatatcatgaatcctttgctcacttttgaattgtgtcgtttgttttattcttactgatttgcaggcattctttatatattttgtgtatggatcctttccaagctgtccattatgcatgttacaaatatcttcccccattctgtggcatatttttccttttgttcaagtttactgctcttttctttgtgttttatgctttcctgtcttatgtatgaaatctttaactgctctgaggtcataaatatatttctatacttctaaaagtttgaaagttttgcttttttttacatttccacatggattctcttttattttccatatggaaatactatagattaaattctccttagtgtgcattttttcatgtgtttcagtgtccaaattgttgaaaccctctcctgaagcttataaagtatgatattctaaagttacattttataactttagtatttttataatagagcatctctgctgctgactttttaatagtagatagcacagatacaatttttaagctgtatttttctcagataaagaatggattgttaaatgtgcaagacagtatattcttttccttctgtttttctctaatagaatttatttgtgtatttatatttccagtcacattaactttgctctagaagacaactttacaaggatctaaaaggaacaggattaaagatgactgaatactgggttccagaaatttaaaacaatcaggtacaaaagtttttggagggaatgctcccagccagtcagtataaaatagaactgttgagaatgtacacaagaaaaacttaaagtatctagccctgaaatacagtggagggtcccaaaacaagggctttggaatagtcctggttcaaatactggctctgacactgattggttggtgactattggtcacgttactgaaatgtgtgaataaaatggaggcaatgattaacctgtttcatttggatattataaagattaaataaggtgaggcacttagtgcctggcacagaataactttatttttactgttgttattgctgttgttatttagaatacattttatcacatcatggatatggctttctgtatgtatattgtgaattgttattttaagtatatatatcaacatattgttaatagcctggtgaaatcacatggataacagggtaaggtaatctccacgtgtagtgcacaaactatacatgcaaattggggatgatagttttctttattatgtatgcatcacattgaaataatgtaaaaaaaaaagccaaccatctcccacaatgctaaaaaattcaaaacactttttaatagtattatacaatagtaattaatcttgatttatttttaaatcttgaaggactttctgattgacaaatatgaaattatgttaatcttacatttcattcaatttgaatcctgcatgtcatttctttgaatgtggtaatttccatgacatacatacaattatgtcttaacctgatgtcagataaacagaatggcctgttttcctaccattctaattttaaagagtttaattttacttgaaattgataaaagacactgaaaagaggttatttcctactcaaaagcccaggatcggtttttcatgattttagcacattaggaagatttcccttctgctaggaacgaaagggggcctagggtagtgcagtgaggggcagtcacatctctacttggtcccttcttttttctcttctctccctctttcttctcctctccttttattttttattccagtaaacttggggcaaatatggaaaaagtgtttcctgatagggtgaggcagaaggagagggaactttggttacaggccagttccagtatacaaaaagctgggttctaaggatgctttgtatgaatacgttgcgttttactctgagccatgggctgtgggttatagcaatgaaggaatcgtctgcccttttgaagaacttaccaattaatagagaaggtacatcatacaagaataactgtcatatgaggcagaatttgaaaaatgccttcaatgtagttaaaaacaaaacaaaaagtgctgtggaaatacagagaagaggtcccagcccatttgggtaatcaggatccacattgatgtaaatctcagtggcagtcatgctgggtcttagagaaaattaggattttaacagatctgctaagatgccatagataatatgtagtaagtattaattaaaatgacagaatatctttccatattgtcaatcagatcggtttataaatttttaagtgagaaacttctaagtaatcttctaaaaagcaagcatatcttttttacttgtttccaaatgttagaaagtaatactttgctattaattttcataattttaagttataataattctgaataaattatgatttctcgtattctgagagatctttttatagctgaggaaaaaaattactaatatcctcaagggcatagaaaacattgataaggaacactgtttagacttggctgtattttgattattgtttttatctgtctattatgaggctctcactctactgtagaaaataccagataaaatgttctgatgttagtacctgaaataatagattgtatttaagtaaatagaccctacctcgtcaattagaaaaagcaacatcattaaatacagccttattaaattgctttttggaggagagagaatattttatttttatttatttttaatgatgaaatcgttaactacataatgattaaaccacagtccagacatattgcatagcttctgctagagctgctcctgctgttacttttacctggtagaaagtaggtgatgtgggcatggttattaaggcaagaacatttagtgcattgctacatatttgatggctgttgtttcagatttttcattaagtccagaataacaaagccacattcattcattcatttttttcatcattttcattcatttctccttttttttttccagcttagcaaatcatatattcttctgtggagctgagaattgatgtccgctcttccccgtgatttggaactttccaatcccagagaaaagttgacaaaggtctaaaatttatttttccttatcacaggaagtcaactctgaaatgaaaattttctactgatttcctttatagagttaaggacccatgtgaattttgagactactttttcagacctcagcaggaagattcccgtaagaggccatccagtagttccagaacagttaaaacatttttggagttttatagctgttcattcccatgcctaaagcttaattcctttatcttcctttcacaacatttgagcttagcttattttccctgctaattagaagtaaagtaattttaacctgcctggttccatcgaacataagggatcctgattttaccacatactttttcctcagggactgcccaggactgagtccatatggaagaagaacttcctcttttctctggagacagtggcaaggttagaaaaaaatcatgcccttggagcatgtgtgttctgttgcatgaaacatacttcatgaagcacctattggtcaccgataggaaaatcaatgagatactatctatctttgaggggctcacagtgtaatcactgagatgccaacagataatcgttgtgggtatggagaatgctgaaggggccagcaggaaactgatatacctcaggttaagagaaagggctcccagcgatggtgacagtgacagatgaggcgcaaaggccatcccctgcattcagacagtgctggcctgcaagaggctatgagttgatcaatgtttatcccattcccagagatttttaaaattataaactgtctgatcttagatgatatgttctcaattcatcatagacattctttaatttctttcttcatcacatctgaacatgacagtcaaccaacttatgtctactcagtgtccagttgttgttaaaagcctcacatcttcctgcacgcatattgatttccatcttgtgttattttgttaaatttacataatatctgcttattgctattaacagcttaatattaactcactattatttaataaaatcaggtcaaaattcaataaaactgtaaataattatgcaaagccagcattgtatacaaagatggcaaagcttttgaaactaaactgtagcattaccgtgtgcagacttaagtgttcatttgtgagcccttgtaggaaagtccaaaagtagtttacaaaagtaatgtatagaactcgagagtcctacaaaaatgttaacagaaaaattcctaatttttcctaggaacagctttcataaaataaagaatagtttcacagaatcagcaatgaaattactatattattactacatagtgattgaacatatacaaatatatatacaaagtgttataatgaatgaatatgatataatgaatactacatagtgaatatatttataagatataatgaatataatgaatatatatgaagtgttataatgctaggaagtactcaaaagttgaggtgttggcattttttcttaactcttttttgctaggtatgcctaacgtaattttgattctctttaaatatactgtatcttaaattgaattgcaacaacttgatagctgtctgtaattaagtgaagtttggttatacactcgattcttcatattgctggagaagcatagttatacaggtatcacacactcaaaggaataataaagtgcaatttggtctctaattttgtggcagatgtatttccttaattatgttttccttgagctaatattaaaatttcactacttgacatttctcaaacagatgccaggtcttgaaggaaggggaggtggactagatgtgagaaaagtagtaaaagaaagccagtctgggttaattatcacctgcagtagtgttatttgcagtaaggaaggttacctgtgccaaaccaggactgaattctagggacaccatattgccatgctctcattccttagtagtgcttttttccccatacagatttttctcttgaccatacttggctcttgctcagccagtttcttacttgacagttgggcacggagttgattgggtcattctgcagagacagctgctgtcatgcagaatggctgcagatagattgaggctcctatgggggactattgtgtgaatcctacattgtttcatgagtgtgctggacagaagaatgtatattgcttctgtgaacaaagatgctgtaattccttgagactgacacaggtagagtatcccttatccgaaatgcttgggaccagaagtgtttggatttcagattttttttttaatttttgaatatttgcattatacttaccagttgagtatctttaatctgaaaacctgaaatctgaaatgctctaatgaacatttcctttgagcaggacctttgaacatcataattggtgctcaaaaagttttgggttttggattcagatttttgaattagggatgctcagcctgtattaaatatgtacttcaaaaaatgcaaatacatgcattttataaatttagtcatcagttccctatgtaatagttgccctaacaaacttaaaaattgagtctttgatgactaacttccaacagccagccttctgccagaaattaaaagcaatgtattcacatctctgttgtacttaggttatattgtaattatttgttttctattaaattgtgacctccttgaagagaatgatcatgtcttatttttgtaccttagtcaatgatactatcagatcccacattctcttgacttgtagcatcatttcataaaacttacagactggaggtttcattaaagaaaacacacgcattggaatcccagtagccagtagagttacgggctgggtaccataggtttttatacaggtgggccaggaagaaagcctagaactaatcatttgtagacaggtatgtaagagctggctggaatttacagcctgattctagacatccagaaaaccacttgattttatagcagagcaggacgaaatataaaactctgcttgcaagggaaaaatgaaatagccgtcagtcattgtatctttccatgtgtgctgtttgtggaagacaacccacagtaggtattattgcctgttccttaaggagtctgagaatagccaaagccctgcagatgcaagcaaacactaggtctaccagcagtatcacagtttatgtaaactttttactcaacaatcagatgatatgtggaaagaactctgggctttaatctggctcatccactgagaagctagtgatcttgaaagattacttagtctccctgtgccccagtttcctcataggtaacatgaggataataatatctatgtcctacaattgttgtgaagatcagaaataagatataagatatagacattattagattattaacatctacattaaatacttgttccacttcctaaaccttgttcttttggaaatttacagacttaaaataggaaaaaaattaaaaacgaaggcctcatagaaaataagatttcttcatgatattgggtggtggggtaatttaaagtagaagcttaactaaaagctaacgtaacaaaattccatccttagctctattgtggccttgggcaagttgctcttttttcagtaaaccaagtgtcatagagaagaaatacaaattttaaataaagattcttggattcctcaattaatgtaacatcaccatagaacactgtgttcctaaaattatatatataataaaattggggacatagttttacacttgcatataactggaacttcttacatatgtgagatttttttttgaattccaaattccaaattaaggttgtcctgtaggaaatgcctgtggattttcctacctctaagaggtaaatatatatatatatatatatatatttttttttttttttgcaaagtactctgtaattaaagtaaatgcagaaacagtaagcactgtttcaaaagtgaatgggagaaccaactgttggtgttgcccaaaagataacagaaggtgtcctttttagggcaaggtcttatgatccaagtggcacgtgagggaacatgactagatttggcatcaggagagcttagccctggtacaggctctgccattaactcacagggtgatgctgatagcagggacaagctgcttgtcttctctgttagtttctttgtgctgctgtaacaaatgactacaattcaaacaacagaaatttcttttctcacagttctggaggctagaagtctgaaatcaaggcatcatcagggcaatgctcccttgatatctctcaggaagaatcttctcagcttctggtggtggcccccagcaatccttgctgctccttgacttccagatgcattactgcagtccctgtgtctgttgtcacctggccttcttccctgtgcatcactgtgtgccctctcgtcttcttttaaggacactagtcattggacgtagggtccactctaatccagtatgactccatcttaactcattacatctgcaaagaccctatttccaaacaaaatcaccttctgaggttctaggtggatttggactttggggggaagccattcaacccactgcagctcctctctggggtttcttcgggtttctcagaaaactatcttttgagctctttttagctacagcattcaatagtgccatgaagattattcagaaaagatagaaacctgaaaacaaagctttatttacaagaaaaaagctggtggctctgcttgtttttgctttaggtccagtggccattgggacagctgctccgtgcatcctagcttccctttactgactgcaaactttactttggatacaagttaatactgttggccgtgatcagaaggaaacttaaaagtttgaggacttagtaacaaagttgtgtttgatgatatggctcaggtgaagtagaaatggagagcttggagccgagagcagggatttggggcccagttttcggaatggcttccgtgtgaaggagttacagaggatgagatggaaaggagggctgtgaatctggaaatgagtcacagccattcatttacttgttcattaaccaacacaaaggtaggtattgcattgttagctcctttcaagggatggatgacatggtggtgaaagactcggtctctgtcctcctgaagtgtactcaggagtctgtgaaggtggccccagagaaattcatggtaatgaggacaggggaggcttactaagttaatagtgtggacttgagaagagcagagttgctgacttgtgctctcctaaggtggaagggacaagtaggtgttcagatctgtagaaggtaagtggatagtccactcagttatacaccagaccacattcccggtaaggttgatttaataactgatgggaaagagaggccttagaaaatctttgttgctttaaataatgtgtaagtttgttgatgctgtgggaaatagcagacatgccatttgatagacatattggctgtttatgtatcttattataacctacaaaatgttggcaagttgaaaagtatatcaataaaaatgcctcctaagtagcaaataggtaaaactctttcaaacaaatttataacttcctcttataggagtgtgggtgctcgtgatcttaatgtatgctgttagggggttaattgtgaccctgcaacatttatgtgttgaagtacagccagtacctcacagtgcaacttatttggaaatggggtcaatgcagatgtggttagttaagatgaggtcattagggtggaccttaatccaatataattggtgtccttataaaaaggggaaatttagatgcagagatatgcagggcatggggggagatgatgtgaacagacatagggagaagacagccatccacaagctgagaagcacagcctggaagagatccttccctcacagccctcagaaggagctagctagctgataccttgagtttggacttccagtttccagaaccataagacagtaaatttctgttggttaagccacctcgtttgtcactactttgttacggctgccttaacaaacaagtacacgtgttttctgggtgttaattcctgtcaacccccaaacttccttgagggatgaggaaacccaccaattccttaaactgaaggccaagtaaagcttgcccatgaactaaaacttcggaccatttccttggtgtcactttcagcgttgttctttaccaagcattgttcttgacttagagagcagatgacatggcagctctctctctctctctctctgtctctcttgcttttacaaccagcctagtttccacagctacttttaagacatagccaatatttaaagtatctgctgaacattcagttcccagaagcccagctttggatgactcctgtgtccttgaggacaatgagtaggggagacctggttccatccgggcctccgctgctcgatggctgtgagccgcccaaaagcagctggcagaggcaatccctgcagctgcgagaggcctctcaaaaatggatgcagtgtgttcctcccaaaaccagtgttcgccctcttctacagaactgaaggggcagagaaaattcactttttaatttgtcatttcaacatatattttttccttttcagccagtacaggctactctgtcatctttgaagatgttagatgtgggaaagtggccaattttttccctttgttctgaagaagaactacagttaattcgtcaggcttgtgtctttggcagtgctggcaatgaagttttatacactacagtaaatgatgaggtaattttgaagaaaataaatcagctactcacatttttagaaatggatttgccaaattgaagatcttgggggaactaaggaataaaaggttaaaaaaaaaagcatggaaattaggttttatttattatataaagaagcagtttgcttaaggaagatgattcctgtttggatgtaatttatagatttgttagaaatagaactgcttgaactaacagtggtttttcccatagatttttgtgcttggcacaaactgctgtggctgtttggggttaggtgacgtccagagcaccattgaacctcggagactggattctttaaatggcaaaaaaatagcctgcctcagctatgggagtggtccacatattgtccttgcaacaacaggtaacctaggaaccccatgtagaatttcagctttattcgcagctgcccttgagaacattgtttaattggttgagagttgctagctcttcctgtgaaattgactatgttttggataccataaaacatgaatgtatctgaatgccagcataaggtgatgtggcagatggaatctaggaatcattggcattttagatgtatgaatgacaacgctgtaagcccagtaaacactgacgaactgattgtggactttggcaagtctgtctgaactttggattcttgatctatgaattgaaagactaaaccttgtgtccaacatccccccgccaactcttagcattctgtgattcttacactaaagagtgactgatggctgtagttggcattagtagtagggattagccacttcataagggattgactagaaaaattccttgctctgagtgaagcaaggaggaaaaaaggaagaaaataaataaaacttctccccaaaaggttgtaaccatggatttgtagtttaattcacatcaagactgaacggtccaagaaatctcaacccttgaatttattcaaggtactggatggcaagtgccttaagggcatgatagaagttaatgcagatcctttctaggggaaggcacctttatcctaggcctgagagaattaaccaaaataattgttcagtggcaataggcagcacatagtcagagataaccagatatacagtagtctcccgttatccttggttttactttctcaagtttcagttacctgcagttgactgtggtctgaaagtataaatgtaaaatttccaaaataaacaattcataagttttaaattgtgtgccattctgagtagggtgatatttcaccatcttgctccatcccagctgggacatgaaccatccctttgtccagcatctctgccatagacactcccacccgttagttacttagtagctgtctcagttattagattgactctcttggtttcatagtgcttgtgttcaagtcacccttattttacttaataatggccccaaagtgcaagagtagtgatgcttgcaatttggatatgccaaagagaaaccatacggttcttgctttaaatgaaaaatggagagtttccatgctgaggttgttaagatttatggtaagaacaaatcttctatctgtgacattgtgaacagtacattttgtaattgttctctttgattattagttattgttgttaatctcttactatgcctaacttacaaattaaactttatcataagtatatacgtatagggaaaaacagtatatacaggttcagtacgagagtcttagaatgtatctcctgcagataaggggggcttgctatgcaaggaaacaaggtaccatgaatgggaaccagaagaaacaacagacagcaagaacggattactaaatatcaggcattaaaattatcagacaccaattataagacagctgtatttattatttgaagaaattaaaatgagcttgaaaataatctgcagggattatagaagatttgaaaagatccaaatgaacaatatgattatcaatatgaaaattcagtggacaaattttgtagcagtttgaacacagcaaattagtaaaattagtaaaccagaagataaatgagaagtcactattcagaatataacactaagagacaacatgctggaaaatacagatgaaatgagtacaaactgtatgattccatttatttaaatttcaaaaacaggaaaaactaaacatttgtatgcaagatgcatatgtgagggccttttggggggtgattataaggttatatttcttgacttaagtagtagtacatgggtgtgtgctttctaatttgtaaaactgtacatatatgttttattaacttttctgtatattatgctacccaataaataataacaaagatttttaaaaatcaacttggtgattattttaaagataaggaaattaagacctaggggagttaagtggccttctaatatttgacttcattctaatgtttttgctattactcccagcagccttttctctgctctttattaaaaacttattttccagttattataactgcatgcatttaaatttcaccttgttgctttgaggtagaatgcagtttatactttccaaatagattcttttgtagaatgactttggtggaatggggaagttgattagctttttgcacctgaatttttagatttcatttgtggaagctgtgctacatatattttcgtataatgaagtagatgttgtaaaaaactgattgtctttctttttattttcagaaggagaagtctttacctggggtcataatgcttatagccagctgggcaatgggacaactaatcatggtttagtgccctgtcatatctctactaatctgtcaaacaaacaagtcattgaagttgcctgtgggtcttaccattctttggtgctaacatctgatggagaggtgagaacagtcagcataaagctcattgatttttttcaataagattatgtagacttctatagtagtcctggaaatacaatcatttgattaaaataaccacctccctcaaattcagccttatttttggtagcaattcacagtcagggtgttgatgttgtgacatttacctgtacgtagtaaggtcttccataattgcaaaatttaaaaggaggtattgttccttctctgttgctgtagtaaagaggttatttgcaataagaaaaatccccaaatgctggaaaagatggctggggcaaagtagatacttttgtgttacattttatttaatagtaattattactgtttgtatagataacaccaataacctaattgtataaaatcatgtacattgtataagaatgcattttataaacacttctctgcctgtgttgtgaggatttatgaatgtgaagcactttgagaggaaagactcggtgccacaagtacatgtcagtgtccagttgagacagtttataaattaatctgtttcatttactgatctttcctttaaacaggtatttgcctggggttataataactctgggcaggtaggatctggatcaacagttaatcagccaatccctcgaagagtcactggctgcctacaaaataaagtagttgtgaccatagcatgtgggcagatgtgctgcatggcagtagtagacacgggggaggtaaggaagttattttacatcttgtttaaaaaccgtgtttgccacatcagtctcatgccagtatggtatgtcccacataacagacagcttgctggccatttgtctcttgagaggattgagggtctcattttctctcaggtctatgtctggggttacaacggaaacgggcagcttggactcggcaacagtggcaaccagccaaccccttgcagagtggcagctttgcaaggcatccgtgtccagagggtacgtccactgtcagtttgtgtgcgtgtatttttaagtcttcgctggcaaagatatcaatgtattaaaaacatagatttgttggcaggatgaaaagtttagctgcttggatgtcttcattaaagtaaaggttaagtctctttttccttgaattaaattgcagctgttcagaaaatttctcttccagggcactgtcacataccttttggaatataaattgttacaagctttcctgaggaagcttaaaagcttttataccctttgacctgtagttctactcctagggaatttccctgaggaaccaacaattcctgtaactgtcttacagaattagttaagaagatacatatacatataaaaagaggataactttaataaaaaaaataggtgtaacagaatttactaatcaaatcgtaagttaatgattagataaattatgccaagtatatatgctggagatgatgtattgtatacaaagaatttttaatgacatggaaaactgctatgtgtaatggtaaaatgaagcaagatacagaactgcttatacaacatggtcagtaaaaaaatgctataggtacatatctctatgtctatatagaaatagaaaaaaaatgcctctgatattcagagtacttttatatttatatttttctatatttttcaaattgaacatgttttacttttataatcaaaaaagaaaataattatttaaaaaatacaagtgtctgtttcttacattcccctcataccccttgatttctgtgagtattaaagctctagtgaactggggcaggtgctcacgccagggtactcatggcaatcttactgcaattctggcccacatgttctggaaggatgttggttaacttaatgcttgcctctcctacgggtaggctgcctcttcctttttttttcatttttgattcttaacctactttgtggaagcagtgaaataattacttatatttgcagtcctgagtggatttttttccttccaggtcgcctgtggctacgcacacacattagtattaacagatgaaggccaagtgtatgcttggggcgccaattcttatgggcagttgggcactggcaataaaagcaaccagtcctatcctactcctgtcactgtggaaaaggacaggtaacacgggcattttcacagtccccacactggtctttggtgattgtgattaaacaggacttagatatatagagaatggtggggaatgtactgctagtgttagaatattatttaacaagagtatttattcctttagaaaaattggctttggaattgttggggaggttgattgtatgttaaatatgctattttcacttacccatgtttcatctatacctccaacagctattctaagcaaactgcagtgactaaacttgcaacagctattctgttactcttctgccttacaaatcacccttttgccctcctccttttcctgttttacattcttaagggggtgtcaataacattcaaggtcgctcttccctggcttaggaaaaggtaccttgcatggggtataaagctggtcactcagctacatggaaatttgccagttgagaaggatagggttatttcattactttaactcccaagctgtcactacgaggaagagtaaaatggttaggaaattaagatttacttttgtgcacttgtttgcaaggttgtgttatgtaattagcacatccagaattagtttccacgttattctgatatttttgaaagcctttggaatttctcaagcatggtcagatcactgcctttccacttttcatttcctgatagtagtgtagagcaaaaacgtttcactatcttttcttttaaaccagggttgcagtcattgtagaaatgaatgctgctgtttttactgcatatatctttattatatttaattttaaaagaaatatgtagacaaacagattagctcacatttatatgcagttcttttctaattttctgctggaatacttaacaatgaaaatgaagaaccaaattgtcatttttcaactgcctcagttttcatttgggtattgtgaacttggctgactttctttaacctatgttttaaaagttttatttaaccaatttaacataggttaattttataggttaaataaaacttttttctccaaaaaccttaaaatttaagacccctggccccttcagaattgggaggagggacaataatggaggcaggaggtggtgcaggtagatgcctgcagctgttcattcacacatcttgtagcttagagctcctcagaagagaagggacagtcctgaggctttgaataaccacaaaagtgcctcagttggtagggacacttaacatttaaactgaaaaacagagttaaaggatcaaataaagatggcatggaaataaaaacgatggatttgtatggcctgttatttttttatttttattttttgagacacagtctccctgtcttccaggttggggtgcagtggtgcaatcacggctcactgtagtcttgacttcccaagctcaggcgatcctcccaccttagcctctggagtagctgggactacaggagcatgccaccatacctagctaatttttgtgttttttgcagggccagggttttgccacattgcccaggctggtagctcctgggctcaagtgatcctcttatctcggtctcccaaagtgctgggattacaggtatgagccactgcgcctggcctggcccattactttttatggtgctcctacacttacccagaactttagcacatccatccctggtctcacagaatctgccgtcattgcccaccagtgacttgctgcattgcactgctggtccctgatccagaatgatcacccaaggcttctgattcaggttctcactggggcagatggattgtggggcgtcaaggtgggagaaagaaaaagtagcagagaagcaggtaatgggaatggaagctgtgtgagtgccaagttgcttaactggacattgggagttatctattgcatttctgtcttcttaaactgcagttatttttgaattataatttggttataaaaatcatggatgggccaggcactcacgcctgtaatcccagcactttgggaggccaaggcgggcggatcacctgaggtcaggagtttgagaccagcctggccaacatggtgaaaccctgtctctactaaaaatataaaaattagctgggcacagtggcacatgcctgtaatcccagttacttgggaggctgaggcacgagaatcccttgaccccaggaagtggaggttgcagtgagatcgcgacactgcactctagcctgggcagtagagtgagactctgtctcaaaaaaaaaaaaaacatggatgaatgttttaaatgagatgttcctgattttctgttttccgtacttgaatttcaagtggtggtttctgaacttgcacagtttcaaccaggcactcaatcacgggcgtattccgagggaggggtttataggtctgtgctgggacttgttctgcacttctccaccctttccagggatgggaaagtcaagtatatgtcataacttatccctggggaaccccggagccttacttctgactcttctgcggcccattgcaggaaagcctgactaattaggaactggattgaatgtggggtggggtgggtttcagttcttagttacctgttcacagaagtgggaaggagaaatctgtctacattgttttctttgctggagcaaccatccaagggaaaccttttaaaatctttcccagaaaaagattttatttatgatggagaatactgatatttgtcagcaatttatgtttacataaaaataagtttaatgattaaaatgattgtcttctcctaatccagtcatccaatctttctgaagtttcagtaccttggggacagattgaccaacatttgtatctttgttcttaacgttccctaacggcatattttaaactaaactgatgtgaagctaacttttccttgaatttctgagaattctttgacttctgaggtagttggtataatacttgggctcttacaaaaccaggattgggaatccctgctgtggatctgtcatctttgctgtttcttctccaatattcttctccctcacagatgacctttcacccccctcaaggttttccagtttctattctttctcactctctgctttttcatttctagtacttcatagccaataagctcagcagttgttgttgatcattccctcaaggtgacacaaaacctgtttattatcaacatgtagtgattttttttcccattaagattggctacaaaataaaagtgtgaaatacgccagacatcctgacagtaaaggttagctcagttgatagtcattgtctgtcgcatgtctggctggaaaattggaacgtcggtgtttgctgcttggtgtgagtccagtttaaaaaccaacgatgaccttaggcaatggcaggattccttagcggttgcttgggtcacaagcctagacctgaaagtaccctctaaactttctgcattctcattcctgtagcagctactgcagccaaccaaatccgcgccccacccctgacttcccatgtggagccgggtgtgccaggtatatgtcacaaggccatgccccgggacgggcagcatcacatggccttccctgacccaccctttggctctgtctgtcccagcccttctctagagagtagtgtcccacttcaggtcaccagctgctctaggggcagaggctaccctctttcatggatgctaataacaaagaacaaacatctcagaagggaacataagaaccgcattatttggcttttctgatgttgggcagatcagtgaaggatgctgttgtgctccagtcactgacatttttcatagaacattaccccaaaggacacagaaatgattccaaaaaatgtagaagtctttgcctagtaggtcactgcaaagtgctaaaatctgaagaaaggaagagcagttcataaatgcttatcttcacattgttcattgggctgccctaacctcccctgctcccagagaatgccagatggctttacaattgaggtggttcaaacacagaaggccctttttccttttattaattgctcagctatgtgtacattggcccccacacctgccacctgaccagcgcggcttctgcctccctcagcactgccagccgggggttttcttagactcatcccctgggccaccttccgctcctctccctccctctgcattaacatccaggccaccctcattactccttggcaacctagcttgggttggcctccccagccagccttccagactattctttctctcccttgcagcctgtcttgcacaccactgtggccaggtcagtctttctgagaataccatttcctcacatcatggccctgtttacaaagcagtttcccatttgcctatcacatcagatcaaatcagaactcttcggctctggattgaagccgacgccactgttcctggcaagcctcattgccctccgatcccggcgttggcctccgtccctgtcaggtcttgtacgatgctgctctctgccatcctgccgtctccagctctgcctgcatgttggtcctgcattgctctccacctcacagactcttattccacggctctggccagtccaaagcatacatggcccagttagttcccttttacttgaaatattccctgaggagcccccaggtatttttccttactcactggagacttgtagtcagggccacactgatgtcatttgggaattatttgcaaagtcacagatctggacttctctctccagctaaatcatgagttcctcagctaaatcacgggcccacagttctgcagcagctggtaaacacttttagtcacggaaggaagcctttttcggttctcagctctgccaaggaacttatttcacgtacacaaaaccacaaaccgtgagaggattgctgcctgtatcctgttccccctcatctttttttttctttgaaaagatggtaaagctgattataagaatttaaataacgtggccctagaactacactctgactctgatccgcgtgtcctgcccacagcaccaggccacgaagacagaccatgtcgctatcctcacatttgcttgtaacttaggaggcttgccagtaaaatcgatactaacagtggacgtacttctctttgaataagtttattctatttccttctcccattttctttatttgttgaaaagaatgatgctgattgagaagccaaatattgttaaccattttccccgtctggcacggttcttttgcacagcactggattaggccaggggactggcctaaccctgcaaatatcaggaaaggactcttctagggaaagtcgtactaatttgaattgatcactagaaatacatggtctccacctaaaagatgctttgtcacttaaaaggctgagtagtcatcataatgtaaagaaacctctattgtcatgcaaccatttgcacccagacattgtgcctggttggcacttaacattttatcacttgattctcacaccacccttgcaatgtgatgaaaccaaggctcctaggtgctaagtgacattcccctagtcacgcagcctagtgctagtcacgcagcctagtggtagagcgaggattcaaacccagtttttgttttcctttgagctggagctgcaagaaaaaaaaaaaaaaagaaagaaataaaaaacaaacctaggtttgactccaaatcctgagctctccactgtgggccatcgtagcctttttttcctctagtatttttgggtggttttcaagggctaagaacgatcctcataataagtcagtgagattaccgcacatgagaacagcatgtctcagcctctgaggcgagccggtacaagctccaggttctgtgataacacctccctcctggtttgagagcaactgcctaaaggaggcagtggaggatcatcctcacccttcaggtgctagcccgtgtcagtggggtcttacacaacctttgctctgtgttgttgagtcttcctcagtcagtaaagtgacccatagattatattcagtaagacaccacgttatgtgcttagagagaattaagccagtgattaggcctgccagaaactggtcatctcgctgaacaggtgaaacggatgcataaagtaacagggccaggctggaatggtgtggacaggaagtgctgcaggagctcaggtgagcgggagacctcaaacttggggcagtttgaactgggccttacaagatgggtagggtttgtaaggcagagagaaagaacattcctgaacaaccatgtatgaagtcattgaaggtcaatgagaaagcctgtttgttgaaacagggtgtgtggacaaaattgacttgtgagatgtctgtacagaggtgacgccaaatcatggatggagttatgtcttgtgtcaggattttatctgagagaagccactgcccgtgtgaaagttctgatgagaacggtgttccaagaggatgattaacctgccagcactgtgtgagttggggcagaagagagagtctaaggcaagggagacctgggaggctgttacaggggccagatgtggggtgtacctgaccccccagtggtggctgaggggagacattacaaagaaagcatctttgttatttaactggatattctaaagaaagtggtaaatgaggagggagaagtcaaagatgaccctgaagttctgagcctaagtctctgaggatgctggtaccattgtctgctgtagcaaaatcaagatggggacttcccctgggttaaaagagtttaccattttccttcaatctgtatggtggcttattctgatggaaaagaaattacttccagatcaacaagacaatgttttccattaagaagtgttctgaggccgggtgcagtgtctcacacctgtaatcccagcactctgggaggccaaggtgggcggatcatttgagctctggagttcaagaccaacctgggcaacatggcaaaaccttgtctctacaaaaaatacaaaagttagtcaggtgtggtggcttgcacctgtagtcccagctactacagaggctgaggtaggaggatcgcttgagcctgggaagcagaggttgcagtgagccaagatccaagattgtgccactgcactctagcctgggtgacaaggcaagactcctctgtcttaaaaaaaaaaaaattgttctgagaattacctcctcatcaatcgtgaacttagagcagtagggcatatcacatagtgatcctaggaaactgctctcctgggctccaggtcatacagcccagtgtggtagaactactgaatttactctgtgcaataggagttggaatgacccatagcattctaaaaattggtgaagtcttcattaaaatatttatttattggccctcagtccagatgacccaaatctttattattttcttcagtaagtgatgttttagggggaaaaattttaaaccacccttttttggtaggggggaccactactctcttgggttatacttgaatttcaaaacaggatggtgcatatttttataggcctactggctagaagtggtacaaacagatcttcatgagttataagtgccattgaagtgtggcttaaatgtaaataacggtttggtgcctgataatttaggagatgaggtgtatgagtcatgtggtggtttgttttgttttgttttttccttttcctgaccctttttgtaattttatgatgtcccacatcagttaaacctggcgggaggaggacccaacttgtttctgccccggtcactgtgcttatgtggtgtgtgtttgtgaatttaggattatcgagattgcagcctgtcactccacacacacgtctgcggccaagacgcagggtgggcacgtgtacatgtggggccagtgccggggtcagtccgtgatcctcccgcacctcacccacttctcctgcactgacgacgtgtttgcctgctttgccacgcccgccgtcacgtggcgcctcctctccgtgggtaagctggtcactgtccatttgggggatggcctgaaaatctgggaaagagctcagggctttactttgataatgaggattttgttaggtgcactatcataatttatttctctctgatgggcttctacaaaagggaactaattttattttcttcagagcatcagaaatcaacaccagtactaaactaaaagtaattttatttgactacttttttttttttctttaagagagaaagatgaggtcttgctctgttgcccaggctggagtgcggtggtgcaatcataactcgctgtacccttcagcccctgggttcaagcgatccttttgccttagcctattgagtagctgggactatacatacccattaccatgcctggctaatttaaagaaactttctttggaggtggggtctctctgtgttgcccaggctggtcttaaaccgtgggcctcagaccatctttctgtctctgcccctgccaaagtgttgggatcacaggtgtgagccattgtgccctatccttatttgagtgctttttaattttactgagaaactgttttttacttttaactagcgtatttactcaaatgtttaaaatttcatgcaaaattagtgatgtggcttgggactttttcttgttattttgccagatttataagcagatatttgtgagattcttattcttaatgattacagagatgcaaatctgtcttcaggggaaaaaatccattgctcagttgctcagttattttgaggaattggtactttcatgagtaccagtagagtagtgccatatcctgtcctgtgtgttcattatgtctgtagctaactctggaagcatttgcattattctcctagaacctgatgaccacctcacagtggctgagtcactgaagagggaatttgacaacccggacactgcagacctgaagtttctagttgatggaaagtacatttatgcacataaagtccttctcaagattcggtaaggaatcatttatttgagaattgagaaaagtaattcgttcaacaattatattctaagtgtccaactatattaggcacctcagtaatcaagaaaaattgtaaggctgtttttgctcttacaagcatacagtggagcggggagaaatatacatgaaacaagaaataacacaggttgtgtggttccgggaaccagtaccataggcgttccttaggcttgaaaagtggcgtggtcaccttggcagcagggagcagccagcgcacgctccaagtgtgtcctgtgctctgaacactgtattgatacttggacgtccatcagttaccgtttctgcctgggaatcaagctcagctcttaataatcaccttcttataatcacttgtggcgtacttttagatggtttaagaaagagaagatcaaggcctttccagaccaaaaaggtctatagtgaggctagcacagagattttaaaaaatcacatttgtgaatgtttttgagcaatgagctgtgtgcatttcaaatgtgcagtttgatgagtgctgacacatgtctacgcctgtgaaaccactgccccacatccagacagagaacattcccatcacccttcaaagacccctcatgtcctagccctgggtgaccgcagctccttctgtcactgtagctgagttagcattttctagagtgtatttagatgggatgatacaggatgcattcatttgtgcttggcttctttcttttacatgatgattttgaaattcattatgttgttgtgtaacagatatttaaatcctactgcagtgagtcacacactcaacacagcattttagtctcaagttcctctttagtaagatcaagctgtgcagcgtttgctcactctctctatatcacatcaacctgcatgaaagaaggggggtggatttgtttgctgtaacacagtactatggcccgggtggcttaagcaacataaagttctggaggctggaaatcccagatcaaaagtgtcacctggatgggtttcttgtgaggctgtgagtgagaatctgttcctgcctctttcctagctgctggggatttgcagacagtctttggccttccttggcatgtggctgcttaactccagtcagcatgtggcattctccctttgtgcatgtctgtgtccaaatttccccccaccttattttttttagatggcagagtctttctctattgcccaggctggagtgcagtggcctgatctcggctcactgcaacctcctcctcccaggttcaagtgattctcctgcctcagcctcctgagtagctgggattacaggcgcacaccaccatgcctggctaatttttgtatttttagtagagatggggtttcaccatattggccaggctggtctcaaactcctgacctcgtgatccacccgcctcggccttccaaagtgctgggattacaggcgtgagccaccgcgccctgtccaaatttcccctttttataaagatgccagtcatattggattagggcccaccctagtgaccttcttataacttgattacctctttaaaggctctctttcctagtaaggtcacattttgaggtattggccattaggacttcaacacaggaatttttagaggacatcattcaacccgtaatggagtgaggaaacagaattacttagattttataaaaataaacccactgatttctctaaatgctgacagtggttgtggtgtgagagagatgccagggagcccagctctgtccccattagcacggccattggggctgcttcccaggccacccctggcagcaggtttgtatatacagccttgctgaatagatgattgtttgaaaaccctggccagcaaagaaagtgaggagccacagcagggacgtgccagcgtgcaccttcgagagaagaacgtggtcctcacagaggccatctgtcctggctgggaagctaggacctgacatactgcttttttccttcagatgtgagcattttcgttcgtcattggaagataacgaggatgatattgtagaaatgagtgaattttcatatcctgtttaccgggccttcctggaatacctatacacagacagcatcagcctttctcctgaggaggcagtaggtaattgccaaagacttccaaaaacttggcaaaatgttgaggaactgacaaggtggtttctatagaacctaaaagaaagtcactgtgagggtaattacagaagtatttctttttgtgtgtgttgaatccaaacacgtttcccttgttactactttattacaaaggttgactggacagataagagagagaagaatcaaatcatcaccaccgtggagcattgcaggcagcagcatggaggaagggacagagactgagggccatgcagcagatccccgtgtctccaccagcagggcccaggaattccacttatttcagactgtgggcctgagtcagtcaagtctgtgcccagtggcttaggaggctgggaaaatgggcatttccagagggccgtagcttggctaaaaattctgtggtttcagtagaaaggaagaatggatgtgtgtgtgtgtgtgagagagagagagagagagagagagagtgtgtgtgtgtgtgtgtgtgtgtgtgtgtgttggggtgggggtcgggagagaggcaactagcagcttctgccacaggagagatgtgatctgtgtttaaaacatcagttattatattggttcaggtgtgagatgatggtctcctgggttggggttgtatagcagtggaagtattgaaaagagatcagattctagatatattttaaagaggttgctgatgggatttgttgatagatgggatgagaggtgtgagttgagagagaaggatggctgcactgaggtacttggcctgggtagctgccttaatggcactgaggtgaggaagatagagaacaacaggcttgctctggactttgaaagtcaaaggagtttgagcttcccattagatacccaagtgataatttttttttttttgagacagagtttcactcttgttgcccaggctggagtgcaatggcacgatctccgctcaccacaacctccgcctcccggtttcaagcgattctcctgcctcagcctctcgagtagctgggattacaggcatgcaccaccacgcctggctaattttgtatttttagtagaaacgaggtttctccgtgttggtcaggctggtcttgaactcccgacctcaggtgatccgcccatcttggcctcccaaagtgctgggattacaggcgtgagccactgcgcccggccgcgagtggcagttttttatcggcccaccactaacatttgtggggctgtagccaagactccaaatggagacctatgttccatatgtctaaaaacttaaagttatatgtcaagctagtgaacttcagataaaaatatgtccaatcctcccaccttgaaaaatgtaatttcattaagaactgaaaggacaggtttcaattttagttgacatttagagttgcaggacttcttgtgccagaacccaatggcacaggcaggacagacccctcctccagcagaagggtgtgtgggcaccctagcttgcattccaagctctatccacccccaacccaggttacccttttgggccagggggtctgcacattggtggtggggtctaagggaggaaatacccacacatgtggcctcaaggccaattatgcaggcagtcccaggttcccaggtacccaaagtgtggtctagaagtgggcatgtggctccttagccaccctgtgctgaaggtgtgcgtggaggaggcgcagagctggggcttggggcagagtcctctcttagggcagtgcagcttgcatgtgtgtctgaagcttggggccaaaaacaatgaagccattcacaactcaagatttcagtgtcctccagtgggctatctgtctttcctctataactttgataatatttgttattaaaaaagcaagtttccaaccaaagtctaccacatgtataagatttattagcagatagacacaaaaacaattaatatggtaaaattgatgaaatccctgctctttatacttcgtacactctattaagtaccttgcatgaaaagttagcttgaggtggacatgacagtgttctagtagccggattcagctagccttttgatcctggctaccactcatttcagcaatgacaaactaattctgacattctttatgctaattacaaatcctgtaatgaagattcagaaaaacaaataggatctttcagatgctgattgactgcttcaattagagtacttcctatcattccttggggtagattaaaattaatttacatatgtcacctcacccagtctacgttgaattacttgaaaataggtgacaggtaatataacaggactcacctgcatatatagatgatatttaaaaccctggggctggggttttgggaagtaagtgaggaaagtgtctgaggatttaaccctggggcactcaaacatttggaagtcaggaaaaatgatccagcctagagaactgaggagcaactaattaaagagaagaaaaatgcaagcaagtgacaaagtgtcctaaggagagcattatcaaccatatcaaattctgtgtaaatgtcgagtaagaggaaaccagagaatattgcaccctcaaagccactgtgactgccacaggtgtgaccaccaagggtgtgactgcagtagtggtggggatggggttctgcttgtaatggcttgaggtcagaatgggaggtgggaaaatggagacagcagatacagatagctctgtctaggagttttgctgtagagaggagcagtgggatagggtaacaggaggaagacacgtgtccatgaaagggtctcccctcccctcctctcccctctcctcctctcccctcccctcctctcccctcccctcctctcccctcccctcttctcttctcccctcccttcccctcccctccctctcctgtcctctcttcttttcttctcttttgttttcttttcttcttttcttttctttcttttcacggcgggcactcttacagcatgtgtgtgtgctcctgggagtggcccaggagaagctgacattgagattgcaggggaaggggtcattcaaggcgcacatgcttttttcctaggaaaaaaatattaaagctattttccctgtgctcctgtttttcaacagctaatgatttgtgtatcatgtttgctcagcttggctgccatcctgggtagagccccacactgaagtgtaagtgtcagtcagcatcagtctatgcagtgcttcactgaggattatatctaaaatagtgtcaaaatcatctctgagtggctgagtgagcaactgtaaatcaggatgcttgaaatcactccccctaataaacacctctttccgccaggactgctagacttggctacattttatagagaaaatcgtttgaaaaagctctgccaacaaactatcaagcaaggcatctgcgaggagaatgccatcgctctgctctcggctgcggtgaagtatgatgcacaggtaaggaaagcttgcttccagctgccggcctcctggagaaatggaacccaggtgtctgcctcgtaccttaaactaaaagaaagtctgggtagaggaaatatttaatattttttaaaaaatgaagtaacaagagtactagacaacgtataagcgagtatttatataatgttgggatggacatcaaaggcagaagccataaaggatttatagctctgatttaaaaagataagaaacttttatccacttaaaaataccatagagaaacttacaaagtaatgagacactgggaaaaatacttgcaacatataatgaagtctgtttaccagagtgaaaaacaaaaagacaataggaacagtttggttgaaagaaatggaccaaagaacaaatggctctataaatagacaaaaaacataaatgaaaacaaggtataacttttcacctgtcaaagcaggaatatatttttagagataatgtataggatcagaataatggtgttctcctaaactgctgatgagagtacaaattggtatggagaacaatttggtataatatgtattaagcaccttaaattaaagacataattcttcaaggaattcactcacaagtatttatcttgaggaattaatcatggatttgcacaaagacttagcttcaaaggtgtttacttcagcagtttataattttgaaaaatcagaaaaaggttagtgtgaatagtggaggcttgtttataaaatgttaatatcaagaaattatgcagctattcaagatatatcactaagtgaaaaacttatcctatttttattttttgaaaaagtataaatagctgaataaaaaactaaaattcattatctacatagaaaaaaagactgaaaactatgcttagtggttatcattgaatggtgggattgtggatgatttttattttcttctctttgcttatttttttttaacttttacagtgaccatgtattgttatgataataaagaaaggaaagaaaaccaatcttagaaccaaatctttaggaaacaggctgtaacatcttcgagtcagtttccttttggtataaggatatcctctcctttggtcaaagaaaacagagacattttagtagatgaaaggttataactttttttctgtttacataaataatactatgcttattaaagaaaatttgtaaaagacaaaaagtgaggaaggtaatgactcatcaaccagagaacattagcactttcatataacagcttctgagtttttgttttatgtcacattatatatttgtaaatacttgaaacctagattttttttcacttaacattaaaaaaaaagtactacctcaaaacaatgacatttaacagcacagtgaatgttttatatcaaggcaataacatattgggcacttacaacacagaatgtttcatggtcagacaaaatccatgcacttttcctagtccattcttgagcatcacagtgatgagccacggtgatggagggccatctcagatgtcaagatggtggcacgtggtgtttgcatctgaatcaggcttcatttttaatacttttttatattctctatttatgtgaattatttgtctggctaccttccagctctctgttttctagaaagtaagctctttgaggcatggcagggactttgttttgctcacaaccatatccccagcgcctaggacggtgtctgacacagagtaggtacctactaaatacccctttcatggatgttcagttttgcctatagagatgcactgttgtactacagcctgtccagctaattgctgtaccctaaattagtataatagactataagtaaaatagactgtatatgtacttaatgtaaaatacaagctttcgtaaataaagaacagtgctgtatttgatttgcctggctcaagtaagcaagaaatgggctctttcagcaaattattatccctcatgctggactgtcacttagtacataattaatatgagccagggattattctaagcacagttcatgtttcatttactcctcaaaacaaccttatatgacataggcattattatattagatccagtttataaatgagaaaactgaagcttggaaagattaagtaatctgagtaaactagtaaactgcaaaactgggatacagtccaagattgggcacattttaaaaccgcatgtttaactacaattctccattgtcctcagtattttgaaatcaggagtatttatgcatggattcaacaaatattcactgagtgcctgctacatgcctggcactgccctacgcactggggtactgcaaatgaacaaaacaatccaaaatctctgctctcatgggaatttctggtgaggggagataggtgatcaataaatgaataggatatatagtatgtcagatggtgacaagtgatatggaaagaagtaagacagggaagacagcctagggaatgccatcctgagatgaaagttgaaattttaaatagaatggtcagggaggcaagacatcagtgagcaggtgactcaagcagagacctgaaggaggtgtgggtggtgtgttctgggaaaagcaagcccggtgtggagggagcacagtggggagggaagtagctgatgaggcagggagatggtgcggtggaggtgcacagtggcgtgtgtgggaggaggcagggcctgcagagtccataggcaagtttcaggaatcagagttccaaggtgagtggccatcagagggtttggagaggagcagatatgatgggcatttgaagtaatcctcctgcctcctggctgctgtgttgaggagggagggagggaggtagggagagagagagagggtgagagagagaagagaagagagagagagagagagagagagagtgtgtgtgtgtgtgtgtgtgtgtgtggagagagagagagggtgagagagagaagagtgtgtgtgtgtgtgtgtgtgtgtgtgtgtgtgtgaaggagggtacttaggaggctgtataatccagtaagtgatgatggtggattggtccaagttatcacctgtggggatggtaaaaagtggttaagattttgaatacattttgaaagtagagccaacaggatgtgcggatggattagatgtgaggaaaaaaaagacgactgaggaggttctgtccctcagcagctgtaaggatgaaagtggcatctattgagatatagaagataggagcaacattttgggggaaatatcagaaatttggttttgaatatgagaagtatgtgatgtctattagacatccaaatggaaatgtctaataagcaaattggataagcaagcctggaagtcagagagaaatgtgctgaagtcaaagctatgaggcagtgacgtgagacaggtttgaagattaagtcctgagcactctgtgcttagaggttaaggagataaggagacaccagcaaaggagactgaagaggagtgagcagtaacggaagagagaaaccagcagaccgtttcctgcaggctgggaaagaaagcgaaacaggaaggaagaagtccgaaccacaccagatgctgctggcacgtctgcacgaggactgagaactgacgagtgggtttggcgatgagaacgccggaggggccttggcaagcagttttagcgcagtgaggcgggaagtctgatcggagcgtggaagtagaggaactgaagatggggaatagaggcagcttttcatggtaattttattataaagataaaaaggaagagctttggggcatttgaggtaaaacatctttacttttttaagatgtgggaaatggaagcttgtctaatgatgcaaatgactcagtgaaggggaacaagccagtgatgcaggggacagttggtagagcagggccccttagtaggtggagcagtgggatctagtgacagagcaagggctctgctttctatagggtcttggacctttgatccagagaagattgcatccacaggcctctctgtaataggcaaggagacgtggtggggagagcttgtggaggttcttttcaagtgattctggttctcagtgaaataggaagtcatgtcagctgaggatgaggatgagaggggagatgtcaggcttatggggagaagtatgagagtcctgtaggagaatgagcaaactaggagaatgtggtaggactgcaggacagaacagagggccccattttgaacatgaagccatacagagtggtagcattcaaaatagactacaattctttaactgaaaaataatgggggccttgttttctatggacagaattcccctataaccagtaccaccaccctatgccaatttattgaattcttagaatcacaggaactctttccaagtcctgtccttaatttagtatttaggggaagatcccactctagaataaagtaaaggagcatggatccaagtgataactttttagggtcctttcattctcccattaattagcaattttcctgatgctgtccagatctgtgaggcatcaaactgcccagccacctaactccagacacactctaatgtgtgtggtgtaggtatgaattcctccattcctctctgtagacttcagccaaagagatgatgcatctctatctggtttcacttttgtgtgctgtaggcaaaaatgtcatttctaaaaatttaagcaacagcacataattttaaatggactctgagatattcagcatgtatcattgaagcacatttttatgtatagtatgctgtgatgacaagtgggtgtgtgaattttccctgtttatcactgagggcttacctgggacagagacacatcatattgctggtgtggtaccaacagcctgcccagttatcttcaggcatgaaataaacattttcctagtatagtttctttcttttcttaaaagaaaatgtaccgtaggtttatatgtacattggcaaggctatcagcattgctattttttttattttttccatcttcagcatttgctataatttatgtctaaagaagaaaagactatcgtgtgtaatgttcatatgtaattgcttagaaagtatttggggcttttattttttataaattacctacagtagcttggagaggaaacttttaaaaattgaccaccacctagcagcatcttgtcctaggccaagtagcctagggtttgaggcatattggaggtctcagcaccctgccctcacttctccagggccaaaaagcatctggtcagcctcattctgattttcaagttatagttctaatcaagagaattattacagcattattctttggcccagagtgcattacagtaagccagaaaacaccaatctgttgggtctctcttaccagagacttggaagtcatgatttctttaaagcattttcccagttgagattattgaaggcatatgtagtgtgatcaaatccatccatcccatcctgtgtcgtctcataaagagaaaaagcggtggcctgttaatgacttcagagcagcaatttcttggcattactgctttttatggcttacctttttcttccatcaactctttataggcagacatacttaaagacgctgatataaatataaaagaggagtatagggcttttaacaattattgaaagtgaaatcaacagttacaaatactgtcactagacaaaggtaccaaggaattcacacactcacatgcctatctctgggaagaaaaagttagattctttacctaggttagtgcggaggaacttgaatgttactctgtgctacttaaatttttacaagcatagatgattcatacttgttatactttttatgactattctttaggtattaccatgccatcatttcctccacttgcctattaaatcctttttctttgcctaacttgttttagcgattttcatgctatgttgcattgaattagtaaatatgaatttattaaaccatctttgttgttgttcctaggatttagaagaattctgcttcaggttttgcataaaccatctgactgtagtaacacaaacatcaggttttgcagaaatggaccatgatctcctgaagaactttatcagcaaagcaagcagagttggagcctttaaaaattgatcccatctgcaggaaagtttttgagcctttccatttcccctgcaaaagccagagatgaatcacttctctttaattaatagtatgtatgatgagctatgtttggctgagtacttgtaactgtcagaagaaggatggtggtgagtggtctttgtctgcctaaacccagagtttatgtagaaagcattgaatgttctgatcagatgtgactaaggtcaaggaaaaaaaattgaaatatcttatttaccatttcctctttttgagtcacttaaattggacacctttggtaccctggtctcagtatatgctattctggcccaaatgttccattattcagctggctgataccacatagatagcttgacaaggagtgctgtctgtccttaccacattttcagcactcagcacagtgccttgtgtataataggcactcaatttattataaatcttcagtatgtcctgagaacagctttagtcatggaatactgggagaaggaataactttcacaaaataaacttaaaacagcctgtaattattgaggttcatattcttctggtatatcattctgagaaattgtggctaatttagaacattgtttagaattgacaaaaggccctggcaattaaattgtcaaggcccaagggctaattttaattttctttttacttggagtcattcattaatttctcacatgggattatggagtatgaagtattatctttgaatgaaattcctgggctgatctgccttacataatcacataaggtcctttgcttttctttgtgttaagagggacttgcctctgtaaatgaaaatgacaatgtgcttttcttgtagttgactttcatgtcactcactataaaataggtctcttaacctggcaccagtataactataaagcactagctgagaaggaactgatacttacatttcatggacagcattaacaagaatgagataaatttgtactttttagatcaaaacaaattacctaattgcaaaagagaaactgaaatggaacatagtctcagattcttctaatgtgtatctcacaatgtcatgtaatgtaaaggaaacccttttggaattagaattcttgttctgatgctgaactatttggtaataaagtgcttatttgcagataacag

SEQ ID NO: 473 - DNA, 3020 bp, Homo sapiens
tcacattaactttgctctagaagacaactttacaaggatctaaaaggaacaggattaaagatgactgaatactgggttccagaaatttaaaacaatcagcttagcaaatcatatattcttctgtggagctgagaattgatgtccgctcttccccgtgatttggaactttccaatcccagagaaaagttgacaaagggactgcccaggactgagtccatatggaagaagaacttcctcttttctctggagacagtggcaagccagtacaggctactctgtcatctttgaagatgttagatgtgggaaagtggccaattttttccctttgttctgaagaagaactacagttaattcgtcaggcttgtgtctttggcagtgctggcaatgaagttttatacactacagtaaatgatgagatttttgtgcttggcacaaactgctgtggctgtttggggttaggtgacgtccagagcaccattgaacctcggagactggattctttaaatggcaaaaaaatagcctgcctcagctatgggagtggtccacatattgtccttgcaacaacagaaggagaagtctttacctggggtcataatgcttatagccagctgggcaatgggacaactaatcatggtttagtgccctgtcatatctctactaatctgtcaaacaaacaagtcattgaagttgcctgtgggtcttaccattctttggtgctaacatctgatggagaggtatttgcctggggttataataactctgggcaggtaggatctggatcaacagttaatcagccaatccctcgaagagtcactggctgcctacaaaataaagtagttgtgaccatagcatgtgggcagatgtgctgcatggcagtagtagacacgggggaggtctatgtctggggttacaacggaaacgggcagcttggactcggcaacagtggcaaccagccaaccccttgcagagtggcagctttgcaaggcatccgtgtccagagggtcgcctgtggctacgcacacacattagtattaacagatgaaggccaagtgtatgcttggggcgccaattcttatgggcagttgggcactggcaataaaagcaaccagtcctatcctactcctgtcactgtggaaaaggacaggattatcgagattgcagcctgtcactccacacacacgtctgcggccaagacgcagggtgggcacgtgtacatgtggggccagtgccggggtcagtccgtgatcctcccgcacctcacccacttctcctgcactgacgacgtgtttgcctgctttgccacgcccgccgtcacgtggcgcctcctctccgtggaacctgatgaccacctcacagtggctgagtcactgaagagggaatttgacaacccggacactgcagacctgaagtttctagttgatggaaagtacatttatgcacataaagtccttctcaagattcgatgtgagcattttcgttcgtcattggaagataacgaggatgatattgtagaaatgagtgaattttcatatcctgtttaccgggccttcctggaatacctatacacagacagcatcagcctttctcctgaggaggcagtaggactgctagacttggctacattttatagagaaaatcgtttgaaaaagctctgccaacaaactatcaagcaaggcatctgcgaggagaatgccatcgctctgctctcggctgcggtgaagtatgatgcacaggatttagaagaattctgcttcaggttttgcataaaccatctgactgtagtaacacaaacatcaggttttgcagaaatggaccatgatctcctgaagaactttatcagcaaagcaagcagagttggagcctttaaaaattgatcccatctgcaggaaagtttttgagcctttccatttcccctgcaaaagccagagatgaatcacttctctttaattaatagtatgtatgatgagctatgtttggctgagtacttgtaactgtcagaagaaggatggtggtgagtggtctttgtctgcctaaacccagagtttatgtagaaagcattgaatgttctgatcagatgtgactaaggtcaaggaaaaaaaattgaaatatcttatttaccatttcctctttttgagtcacttaaattggacacctttggtaccctggtctcagtatatgctattctggcccaaatgttccattattcagctggctgataccacatagatagcttgacaaggagtgctgtctgtccttaccacattttcagcactcagcacagtgccttgtgtataataggcactcaatttattataaatcttcagtatgtcctgagaacagctttagtcatggaatactgggagaaggaataactttcacaaaataaacttaaaacagcctgtaattattgaggttcatattcttctggtatatcattctgagaaattgtggctaatttagaacattgtttagaattgacaaaaggccctggcaattaaattgtcaaggcccaagggctaattttaattttctttttacttggagtcattcattaatttctcacatgggattatggagtatgaagtattatctttgaatgaaattcctgggctgatctgccttacataatcacataaggtcctttgcttttctttgtgttaagagggacttgcctctgtaaatgaaaatgacaatgtgcttttcttgtagttgactttcatgtcactcactataaaataggtctcttaacctggcaccagtataactataaagcactagctgagaaggaactgatacttacatttcatggacagcattaacaagaatgagataaatttgtactttttagatcaaaacaaattacctaattgcaaaagagaaactgaaatggaacatagtctcagattcttctaatgtgtatctcacaatgtcatgtaatgtaaaggaaacccttttggaattagaattcttgttctgatgctgaactatttggtaataaagtgcttatttgcagataacag

SEQ ID NO: 474 - protein, 549 aa, Homo sapiens
MEEELPLFSGDSGKPVQATLSSLKMLDVGKWPIFSLCSEEELQLIRQACVFGSAGNEVLYTTVNDEIFVLGTNCCGCLGLGDVQSTIEPRRLDSLNGKKIACLSYGSGPHIVLATTEGEVFTWGHNAYSQLGNGTTNHGLVPCHTNLSNKQVIEVACGSYHSLVLTSDGEVFAWGYNNSGQVGSGSTVNQPIPRRVTGCLQNKVVVTIACGQMCCMAVVDTGEVYVWGYNGNGQLGLGNSGNQPTPCRVAALQGIRVQRVACGYAHTLVLTDEGQVYAWGANSYGQLGTGNKSNQSYPTPVTVEKDRIIEIAACHSTHTSAAKTQGGHVYMWGQCRGQSVILPHLTHFSCTDDVFACFATPAVTWRLLSVEPDDHLTVAESLKREFDNPDTADLKFLVDGKYIYAHKVLLKIRCEHFRSSLEDNEDDIVEMSEFSYPVYRAFLEYLYTDSISLSPEEAVGLLDLATFYRENRLKKLCQQTIKQGICEENAIALLSAAVKYDAQDLEEFCFRFCINHLTVVTQTSGFAEMDHDLLKNFISKASRVGAFKN

SEQ ID NO: 475 - DNA, 3201 bp, Homo sapiens
gccagccccctcctcttgtctgcgctcccttcgtttccgtctcggccgggcacccgagcgcatcccgccgaggccgggccgtttcagggggaggcgccaactcgtcgcggcgccgggcccctgaccgtgcagtaaccgctacccaggaggcggagcggacaaggctccggcctgcgaggagtcacattaactttgctctagaagacaactttacaaggatctaaaaggaacaggattaaagatgactgaatactgggttccagaaatttaaaacaatcagcttagcaaatcatatattcttctgtggagctgagaattgatgtccgctcttccccgtgatttggaactttccaatcccagagaaaagttgacaaagggactgcccaggactgagtccatatggaagaagaacttcctcttttctctggagacagtggcaagccagtacaggctactctgtcatctttgaagatgttagatgtgggaaagtggccaattttttccctttgttctgaagaagaactacagttaattcgtcaggcttgtgtctttggcagtgctggcaatgaagttttatacactacagtaaatgatgagatttttgtgcttggcacaaactgctgtggctgtttggggttaggtgacgtccagagcaccattgaacctcggagactggattctttaaatggcaaaaaaatagcctgcctcagctatgggagtggtccacatattgtccttgcaacaacagaaggagaagtctttacctggggtcataatgcttatagccagctgggcaatgggacaactaatcatggtttagtgccctgtcatatctctactaatctgtcaaacaaacaagtcattgaagttgcctgtgggtcttaccattctttggtgctaacatctgatggagaggtatttgcctggggttataataactctgggcaggtaggatctggatcaacagttaatcagccaatccctcgaagagtcactggctgcctacaaaataaagtagttgtgaccatagcatgtgggcagatgtgctgcatggcagtagtagacacgggggaggtctatgtctggggttacaacggaaacgggcagcttggactcggcaacagtggcaaccagccaaccccttgcagagtggcagctttgcaaggcatccgtgtccagagggtcgcctgtggctacgcacacacattagtattaacagatgaaggccaagtgtatgcttggggcgccaattcttatgggcagttgggcactggcaataaaagcaaccagtcctatcctactcctgtcactgtggaaaaggacaggattatcgagattgcagcctgtcactccacacacacgtctgcggccaagacgcagggtgggcacgtgtacatgtggggccagtgccggggtcagtccgtgatcctcccgcacctcacccacttctcctgcactgacgacgtgtttgcctgctttgccacgcccgccgtcacgtggcgcctcctctccgtggaacctgatgaccacctcacagtggctgagtcactgaagagggaatttgacaacccggacactgcagacctgaagtttctagttgatggaaagtacatttatgcacataaagtccttctcaagattcgatgtgagcattttcgttcgtcattggaagataacgaggatgatattgtagaaatgagtgaattttcatatcctgtttaccgggccttcctggaatacctatacacagacagcatcagcctttctcctgaggaggcagtaggactgctagacttggctacattttatagagaaaatcgtttgaaaaagctctgccaacaaactatcaagcaaggcatctgcgaggagaatgccatcgctctgctctcggctgcggtgaagtatgatgcacaggatttagaagaattctgcttcaggttttgcataaaccatctgactgtagtaacacaaacatcaggttttgcagaaatggaccatgatctcctgaagaactttatcagcaaagcaagcagagttggagcctttaaaaattgatcccatctgcaggaaagtttttgagcctttccatttcccctgcaaaagccagagatgaatcacttctctttaattaatagtatgtatgatgagctatgtttggctgagtacttgtaactgtcagaagaaggatggtggtgagtggtctttgtctgcctaaacccagagtttatgtagaaagcattgaatgttctgatcagatgtgactaaggtcaaggaaaaaaaattgaaatatcttatttaccatttcctctttttgagtcacttaaattggacacctttggtaccctggtctcagtatatgctattctggcccaaatgttccattattcagctggctgataccacatagatagcttgacaaggagtgctgtctgtccttaccacattttcagcactcagcacagtgccttgtgtataataggcactcaatttattataaatcttcagtatgtcctgagaacagctttagtcatggaatactgggagaaggaataactttcacaaaataaacttaaaacagcctgtaattattgaggttcatattcttctggtatatcattctgagaaattgtggctaatttagaacattgtttagaattgacaaaaggccctggcaattaaattgtcaaggcccaagggctaattttaattttctttttacttggagtcattcattaatttctcacatgggattatggagtatgaagtattatctttgaatgaaattcctgggctgatctgccttacataatcacataaggtcctttgcttttctttgtgttaagagggacttgcctctgtaaatgaaaatgacaatgtgcttttcttgtagttgactttcatgtcactcactataaaataggtctcttaacctggcaccagtataactataaagcactagctgagaaggaactgatacttacatttcatggacagcattaacaagaatgagataaatttgtactttttagatcaaaacaaattacctaattgcaaaagagaaactgaaatggaacatagtctcagattcttctaatgtgtatctcacaatgtcatgtaatgtaaaggaaacccttttggaattagaattcttgttctgatgctgaactatttggtaataaagtgcttatttgcagataacag

SEQ ID NO: 476 - protein, 549 aa, Homo sapiens; identical to SEQ ID NO: 474

SEQ ID NO: 477 - DNA, 3010 bp, Homo sapiens
gccagccccctcctcttgtctgcgctcccttcgtttccgtctcggccgggcacccgagcgcatcccgccgaggccgggccgtttcagggggaggcgccaactcgtcgcggcgccgggcccctgaccgtgcagtaaccgctacccaggaggcggagcggacaaggctccggcctgcgaggagtcacattaactttgctctagaagacaactttacaaggatctaaaaggaacaggattaaagatgactgaatactgggttccagaaatttaaaacaatcagcttagcaaatcatatattcttctgtggagctgagaattgatgtccgctcttccccgtgatttggaactttccaatcccagagaaaagttgacaaagggactgcccaggactgagtccatatggaagaagaacttcctcttttctctggagacagtggcaagccagtacaggctactctgtcatctttgaagatgttagatgtgggaaagtggccaattttttccctttgttctgaagaagaactacagttaattcgtcaggcttgtgtctttggcagtgctggcaatgaagttttatacactacagtaaatgatgagatttttgtgcttggcacaaactgctgtggctgtttggggttaggtgacgtccagagcaccattgaacctcggagactggattctttaaatggcaaaaaaatagcctgcctcagctatgggagtggtccacatattgtccttgcaacaacagaaggagaagtctttacctggggtcataatgcttatagccagctgggcaatgggacaactaatcatggtttagtgccctgtcatatctctactaatctgtcaaacaaacaagtcattgaagttgcctgtgggtcttaccattctttggtgctaacatctgatggagaggtatttgcctggggttataataactctgggcaggtaggatctggatcaacagttaatcagccaatccctcgaagagtcactggctgcctacaaaataaagtagttgtgaccatagcatgtgggcagatgtgctgcatggcagtagtagacacgggggaggtctatgtctggggttacaacggaaacgggcagcttggactcggcaacagtggcaaccagccaaccccttgcagagtggcagctttgcaaggcatccgtgtccagagggtcgcctgtggctacgcacacacattagtattaacagatgaaggccaagtgtatgcttggggcgccaattcttatgggcagttgggcactggcaataaaagcaaccagtcctatcctactcctgtcactgtggaaaaggacagaacctgatgaccacctcacagtggctgagtcactgaagagggaatttgacaacccggacactgcagacctgaagtttctagttgatggaaagtacatttatgcacataaagtccttctcaagattcgatgtgagcattttcgttcgtcattggaagataacgaggatgatattgtagaaatgagtgaattttcatatcctgtttaccgggccttcctggaatacctatacacagacagcatcagcctttctcctgaggaggcagtaggactgctagacttggctacattttatagagaaaatcgtttgaaaaagctctgccaacaaactatcaagcaaggcatctgcgaggagaatgccatcgctctgctctcggctgcggtgaagtatgatgcacaggatttagaagaattctgcttcaggttttgcataaaccatctgactgtagtaacacaaacatcaggttttgcagaaatggaccatgatctcctgaagaactttatcagcaaagcaagcagagttggagcctttaaaaattgatcccatctgcaggaaagtttttgagcctttccatttcccctgcaaaagccagagatgaatcacttctctttaattaatagtatgtatgatgagctatgtttggctgagtacttgtaactgtcagaagaaggatggtggtgagtggtctttgtctgcctaaacccagagtttatgtagaaagcattgaatgttctgatcagatgtgactaaggtcaaggaaaaaaaattgaaatatcttatttaccatttcctctttttgagtcacttaaattggacacctttggtaccctggtctcagtatatgctattctggcccaaatgttccattattcagctggctgataccacatagatagcttgacaaggagtgctgtctgtccttaccacattttcagcactcagcacagtgccttgtgtataataggcactcaatttattataaatcttcagtatgtcctgagaacagctttagtcatggaatactgggagaaggaataactttcacaaaataaacttaaaacagcctgtaattattgaggttcatattcttctggtatatcattctgagaaattgtggctaatttagaacattgtttagaattgacaaaaggccctggcaattaaattgtcaaggcccaagggctaattttaattttctttttacttggagtcattcattaatttctcacatgggattatggagtatgaagtattatctttgaatgaaattcctgggctgatctgccttacataatcacataaggtcctttgcttttctttgtgttaagagggacttgcctctgtaaatgaaaatgacaatgtgcttttcttgtagttgactttcatgtcactcactataaaataggtctcttaacctggcaccagtataactataaagcactagctgagaaggaactgatacttacatttcatggacagcattaacaagaatgagataaatttgtactttttagatcaaaacaaattacctaattgcaaaagagaaactgaaatggaacatagtctcagattcttctaatgtgtatctcacaatgtcatgtaatgtaaaggaaacccttttggaattagaattcttgttctgatgctgaactatttggtaataaagtgcttatttgcagataacag

SEQ ID NO: 478 - protein, 308 aa, Homo sapiens
MEEELPLFSGDSGKPVQATLSSLKMLDVGKWPIFSLCSEEELQLIRQACVFGSAGNEVLYTTVNDEIFVLGTNCCGCLGLGDVQSTIEPRRLDSLNGKKIACLSYGSGPHIVLATTEGEVFTWGHNAYSQLGNGTTNHGLVPCHTNLSNKQVIEVACGSYHSLVLTSDGEVFAWGYNNSGQVGSGSTVNQPIPRRVTGCLQNKVVVTIACGQMCCMAVVDTGEVYVWGYNGNGQLGLGNSGNQPTPCRVAALQGIRVQRVACGYAHTLVLTDEGQVYAWGANSYGQLGTGNKSNQSYPTPVTVEKDRT

SEQ ID NO: 479 - DNA, 138998 bp, Mus musculus
  misc_feature (1)...(138998): n = A,T,C or G
ggccgctcacaaaacgcggcgagcggaacccgcacgcggaagcgcccgtctcactgagcatgcccagtggcacagtcgaacagaggagttttttttttttctttttcttttctttcttctttttttccccctctttcttctttttctttttttctgggtcttccagtaggaggcccgtcccccaccctcagttcagacccccgccgttccccgagcctgagcagctaannnnnnnnnnnnnnnnnnnnnnnnnnnnnnnnnnnnnnnnnnnnnnnnnnnnnnnnnnnnnnnnnnnnnnnnnnnnnnnnnnnnnnnnnnnnnnnnnnnnnnnnnnnnnnnnnnnnnnnnnnnnnnnnnnnnnnnnnnnnnnnnnnnnnnnnnnnnnnnnnnnnnnnnnnnnnnnnnnnnnnnnnnnnnnnnnnnnnnnnnnnnnnnnnnnnnnnnnnnnnnnnnnnnnnnnnnnnnnnnnnnnnnnnnnnnnnnnnnnnnnnnnnnnnnnnnnnnnnnnnnnnnnnnnnnnnnnnnnnnnnnnnnnnnnnnnnnnnnnnnnnnnnnnnnnnnnnnnnnnnnnnnnnnnnnnnnnnnnnnnnnnnnnnnnnnnnnnnnnnnnnnnnnnnnnnnnnnnnnnnnnnnnnnnnnnnnnnnnnnnnnnnnnnnnnnnnnnnnnnnnnnnnnnnnnnnnnnnnnnnnnnnnnnnnggcctgcgggaagttggcgggagcacggagcccagccccgcgcggcggccggagccggcccgctgccctcgtttcaaactaccgcgctgaccggagcgccgctgcccttgctgcacgctcaactcgcgaagcagagaatgaccgtcccggctactcgtgccggggctgccccgtggaacttttctggaaaggatggtgttggtctgatctttttttaaaaaatacttttccagccgtgacttttggggatctgaaagcaatgacaaattacttgacattaagcagtttctggaattgcagccacaccagttgtaaacatccagtttaattcagcgtcgctttccccagcctggcgtaggtaccttctgggctgatgggtaggggtgaggatgaaatacagattactcgtcccagctttctgaaactacactttagtgagaagggagatcaagaaaactatcgcagtgttagcaaagcgtgaaggacagaccgagcacttgatgactgaaggagagaagtgggttctggcagatggtgaagaaagactttgcagatgtagagttaggaatgtgttcattttggagaaaggacactagatcctagaggtaactggaagtagggaggtatttgaggattaaagccaagaaggaggaagccagtgcttaaagggttggaattttactttgatcttaaagttttgaccaatagggcagagacaaagcaaccctgctgtgaatgctttgctaattgacttgacaggcctttttttttttcctgccctactcacaggtgtaaagatgaaggcaaagaattaagtaactttctcccatgacctggctagaaagtggttgaaataaatgttgatgtaactaggctggttcagtcctgtgtacttagtatttgtttataaagacttcaccccccgccccccccccccccatttactgcaaattgtaagttaaaaatttcactttattcagttttattttcctctttcaatgggatgcctcctttcattttcttgattttttttttttaacaaggctgtccagaataagcttaagtctgtcttcattttagtttatgtagcccaggctggcctcgaactcatgatgggattgcaggtttggatcacaccagacttagcatctatttgagttctacattacactgagtcttactcttataaactagtgatacccctttatttacacatatggccttttgcgtaaattctgaaacatggctgcatcctataagaaggtttgttagtttattaggatcccagaagattctaaatttgttttatccggacttttataactaactccttaagggcagagaagtctatattatttttctgtggtatcttagatacttagaaatatattgcatcatagggtcttattcatttggaagagttgaccttggaatggcccggtcagtcacaaatgcccaggcagagtccggttcctcctttagtaagattgttacaaatctccagcaatgttacattttatcatttgccactttgtactacaagttaggtttacatattcctttctaccaatctgttttgcttctgaagagtccagataaaggctgggatcgctaaagttcttacatctctaaggtgggtaggagttttctagaatcctgacccatgttcaccaaagtttgtgccaaggaatgaaggcatgggctctcctcagtgatgtggcttgtactaggcctttaattagagacttaagcatgctccatgaatttcaaaggtttaaacagataagagtgctgtgaagaaaagtttagactagagaacagctttgaataactccatagtgttctgacatccagatttcccctctggggtggttgttgactctaaacaaaatattctttggactctagtgtgctatgtactaaagtagttgtaggttctaaaatgacatgctaaaacatctacacagttactaatctgttttatctcctgtatggaaaatagggaaagaatagtgagtggcttatgctgataatttgatgcagaagaccaatttattattgaaatttattggatttatgagtattttaagtctcagatgttcagtaatattccggccaaactcagggctttaaaatataaattaagtaatactatcctttcaacagcctcacacctctgacttgtggcacagaggattaggggtcatgggcttcacttgaaaatgttttagggatttttgtagtaatttggtttgttaaaatatctaaaatggcacctcaatcctttgtaatgcttaattctatgcataaaacaacatcataaaaaggatttggctttatatttgtgtagacatgtcgtgtgtcttgttttcctcaattatctgtggagggaattgtctgtttctacttactgtacacatccatcttttatttttaacaatattttaaatattttgcatgtgaggtgaatgtgtctagcatgtatgcatacgtgtgtgttcgtgcatgtgtgcttgtgcatgtgtgtgcacatttggaagccagagaggagactggaagtcctccatcattctctcttgtattctttagagatagagttcctcacagaatctggagctggctccttggtttgggactgactgacacccagcatgctcctgctgtcatcctgtctcactagggcttgcgttacaggttcctgagccacacctagcatttggtagggatccaaacccaagtttcttatctgagccatttgccctccctccccttcctccctccttgccctgcccttcttccttccttctcttcttcctccttttaaatatgttaggaagaatgtaatcattgaatttatgtttgtgagaccacattgtctatagaattaatgtgtagtttaaccaaatcacaagagagtgatagttttcccaattctaagtggtggaaccaagactatgctcaaatattcagaataacatttcagtacttagcctttaatcccagcacttgggaggtagaggcaggaggatttctgagttcgaggccaggttggtctacaaagtgagttccaggacagccagagctacacagagaaaccctcctgtctcaaaacaaaacaaaacaaaacaaaacaaaattcagtacttatttgtagtgcattgtggtgaccaattctcatttaaatggttgattcagaataacccattgccctatgtctttgtaatcatagcctaggcttcatactgagactgtctgaaaaacccaagtcaacaaagacagaattaagtcctacctttagaagtggaattgtttgctgttttgtgtttgggacagaagcttagtctgagaggtggttagtgtcacaatgaaagaacttgtcattttaattggatcacctaaacctatgttttgaagtcttaagaatttctgaaaaaagcaaaacactatattgtgtattttgttttcttaagcagtttcgagttgaagatctataaagcagttatggagcttttttaggcggggcatggtgactcacagatgtccctggatgaagctagaggattgctctaaattccaggccagtctgggttgtagagagacgccttgtctgaagcaaagcaaacaaaacaattttttttttaatttaaaaaatatatttttgaaacacagaatactgatggcttaaccacggaacactccaggtaactgatttttttttttttaatagactggaggagatagagtatgatgttaaagatctccttccccctgcccccccagagtctctctcacctctcctttgggtcatctcattttggctactgctgccacactagcatcttctgtcccaagtacatctgtgttacttttctacaactaagaaactgcagcttatacagtgcaacagccctggtgctggagagcagccataggctcacagtgcacatggaatgtagagtaccaagggactctactcttctgtacatctaggtctagggtcattgctggggtttaaaattcttccttcatagcccaccagtagaagcttagttatcacaataaagagtgcttgtcattcttcagctgaccctctgtgctcttcttgtttggttggtttctgttttcttagaggcccactgttccccaggagactgctggtgaatgagagctttcaatcttaggtgaaaaacaacctgtcacaacagcacaggtagaaccaacctttggtggctagtagcatcaatataactgcttatattagtgctagtagttgcataatacatttatgaaaaggatattaggaatttttattcatccatgttactctgtagcaactcttacacataggtgaacacagtactggacctcctctcccacgtggcctcactgtgtattccaagctgaccttgaactgggaattccgcttcagctttcctagtgctggtattatagccagttacagatgtgtaccattttacaaagtttattatagttactggttacatattacgtgcatactagttttttatttctgaaataaatgtgagaaatgaattttccttctgtttcccttttctctaccttccctcctacttcatttttctttgagacagtctcactgtagctatggctgtcttggaactcagtatgcccatcagcaggctgaacttgaactcccagagctccacctgcataagcctccttagtgctgggattaaaggtgttggccaccacatctggcttataaagtacattttctttttaccactgccataaaaatgttcttgtgtgctctcttgggaaggatcaaaatcataatatcttttagaggctgaagaacactgtaagaaatcagttacttctacttggttttcagggaggcttattggaaacctcctttattcattaccattattatttttagacaggttctcactctgtagctctggctgccagcctggatcttgctgtgtagatcaggtttgctttgaactcatagacgtctgcctacctctgcctccatcttccaagtgctgggaaaaaaggcacggaccacaatactcagctcgacagtcccttctgttttaagatatttcccactgtagtgcacgttggtcatctctctctagtttatattatttgcaaagttaaaatgttgaaaggtggtatgcctttgttaatgttttgccttagaatatgttacacatccctcgctgcttctattgatggtgtaaactgggtattttgtcagcctgtatgattttaaggtgctgtttgcagtcatttttggtgactcacctataaatctagtttcagctgcctgtaggcttgactgcctcaagcttgaggtctataaagaaacttgctgcctcagcaggttggaaataaatttcttctttcacacagcagcatttgctaaatcaactaaaaccacatagtaacagttcaagaatcataaaaatagcacaccagcttactttagcgtatgttttctcattctgacaaaaggaggagaatattagcattttgatgatttatattacacataagtcctgcagtcgaaaacttcttaaggtctacaatgttataggtaggtgagtgtcatttgcacaataagtagactattctaacaataacagaaaaatgtggcaaatgcttgtggaaccatagtacaacaaagaaaagcagaaagaggggaaaagaaatgtgtgataatgtgacacattaagaggttgtcaagtcaaagatgaagagaacagaaaagaaagtcatgatgatgggaagggaaggactcggcctagtatgtactgtaacctcagtagggtgcatctgtgctgtgtgtgtgtgtgcgtgtgcacgttcctgtgtgtataggccctcattacatgccttgcagctttgtagtttttaaggtagacacaaatagatcctcttactattgtggtattagaggtatagtgtctacattaataagttaatataaagaaacatagccccagcaattctgtatgtactgaagtactctttttttaattggttaaatgattttttaaaatttgatattttctatatttacattttaaatgttatcccctttcctggtttcccctccgaaaacctcctctgctctctcccctccctctgctcaccaacccacccactctcaattccaggccctgacattcctctatactggggcatagaaccttcacaggaccaagggcctctgttcccattgatgaccgacaaggcagctagagccatgagtcccaccatgtgttttctttggttggtggtttagtcccagggagctctggggatactggttagttcatgtttttatccctcctatggggctgcaaaccccttcagctccttgggtcctttctctagctccttcattggggaccctgtgctctgaccaagggtggctgtgagcatccacttctgtatttgtcaggcactggcagagcctttcaggatacagctatatcaggctcctgtcagcaagctcttgttggcatccacaatagtgtctgggtttggtggttatttatggaatggatccccaagttggccagtctctggatagtcattccttcagtctctgcttcacattttgtctctgtaactccttccgtgggtattttgttcccccttctaagaaggagtgaagtatccacactttggtcttccttctttttgggtttcatgtgttttgagagttctgaagtactcttagaaaatatttctacttcctgtgtgcaagattctgtgattgtgttggagtttagtgatgtatgacaggtagaatttaaacatattctgcactattgtttttcttgccaagtggtgttgaaaaacatctgaaagcaattaacccagagttgggagcctggagaactttccagtgtaataatatatatgtattgcttgttgtacaacctgtcttaacactgtgtctgatttttgtctagggagaagcaggtagatccatcaatttgtctattcaacaaataattactgagcattgtgttgtggcaggcacttataatcagtacatttaactttgattttgtagttaataggagttggggagttttagtcaggggatgggggtttaaggtagaggtgacctcactcactctttgggttgtaaagtccctgccctgcagtagttggagctgggcaggagtaggtggtgatagttgagatagtgatcaatagattggcttcagggatatttgtgaatctcttctcaaggtgtaaagagtttataaaaagggtattagaagttttatgttatctcataactgtgacaaaagctgacaatgggagtggtaaggaattgattctagttttcaggcttacacacatgaatcagttataatttagtttttatggagattattagaaaattatcatatttttcagatggttgggtcataaaccaaagaaaaatattatttcttcaaagacctcatcttaaacatggctgctttgagttctaagccttcaatgtaaaagcctttggggacattttagtactgtaatggccatatgtggctactgaacacttcagatgtgtcaggtccaagttcaggtatgctaaaacatttagtgaatttggaaaatttagggtaaaaatgtaaagtttgcaatattttatttatatattgaaataaaaatttcaatatagtgtagtgtattaaaattataaagtgagtttttctatttctatttactttcacatgtgtcagagggctggagggcagccgagagtgttaagaacaccccctgctgagttcagtttcaaggacttgttataagtacctccctgcttgcacactgtcttacccagctccagaggacgcagtgagtctggagcgcctgctcccgggtgcatgctcccacctacagtctcagatgcgcacacttacttctttaaaatattccatctctgttggacgccatcgacctgagagccaatctctgagtgagaagctgtgttcaggtactgaaaagtcctagcatttttagaggatgttctctaagcactgacaggtagggaaaatgctttacagtgtattataaagccattcattctagcagaaaatggacgttgcttttaagagttcttggatcatatgatttggtcagtattttattgacttactaacaatagagatagagcagttttgagtcataaataatctaaaagttccttaaaaatgtgtccataccccacatgatctagatctaaaagtacaagtggaaaagtccaagtgtagattttcagaagactgccatgaagactcaggtgaaggcatttgcaggcaagcctgatgacttgagttgggtccctgggactcccgtgttggaaggaaagagccaactcctgaaaattgttctttcatcttcaaaagtgtcctctgacctatgtgccctactgtggggctgaggagctgccccagagcaagagtggggttgaggcgcgtacaagccctgaacatctcctcctgagattggcaggagttggattgcttgcctcttgtcctcagttcccccaaccccaggaggtcatgtagcctgatagccaggttacctcgcctcttataagaccgtgtgtggcagcacctgtgagctatgtgagggggttccctcctcacatagctgggatatgccgaaaggccctaccaccccaacagtttaacataccccccagcccccaattaaatgactcttctcgctgaagctgtgtcctagggtctgttctcatgtgctcccagccacctgaggtctcttccaggccaatcctgtctcatccccccaattaggatcctcttgtctacctccataagtaaacaaaaataaataaaatttttttactaaattcttgggattgacttagcagagcttggaagttaatttggcaaattttgtaaaatacctaatataaaacattaaatattgaatattggtggaaaaattttctaagtagagtcatacttgatggcttatgagtttataaacttcggaaaggaaaggatcaagtgtaaggttgctcttttgttaaacaacttcgagttgagccacggaaaccagcttttctgtgctgctgcctagggcagggagcatctgcttctctttctgtctccactcagtgcccaagtccaatagaggacaggtggtgcctctgctcatggcaggcctgaggtgatggaggctgtcataggcaacagcaggcagccacggcctgagtgtgttcatgtccctttcttagaaagcagctggtaatcatggaggtttcagataaccttatctactctagtcccttccacaggtccttttcctaaactccgtgcccaccctctactactccagaatggagattaaactccaacaggagttttgaaggggaaaagcatatgctaagcatagcaattgagattcctgcggcttgtgtagatttggctacgtgtcctgtgtttgacctggggtgggaggggtagagtgagcacccaggatggctgagtcgtctttagttgcagtatttgcaggtgagcaagatggggatacaccttttcccttgttttggttgctgttggcagtttttctactgaccttttctgcttgtttttcttgttttgtttttgtttttaaaccatttttgtcctagtttatttaatcaattacacattcatcagaaagtctttattgtttctttgataattaaaagttgattcacattgaaggttttcaaatacaaatgttaaacacattatagctacatggatacagtgaaattttagtagttgtctttctgttcatgtctacatatttgttggtgcaaagtagccacctaaaatagtttttgactttgtgggcttttgttattgtttatttttcaagattgggtttctctgtttagccctggctatcctggaacgccctctgtaggccaggctggcctctaacgcagagatccggactgcctctgccttctgagtgctgggattaagggtgtgcgccacccctgcctggcttatatttgatatgttgatgaacaccttcttatctgttttctgctgcctcagttaccagtattgtactccttaaatattctagcagttgtgaagattttgcagagttggtttaaagaaagatgttatttttatataagtatgtgtatcttctttaaaaattgagagtttaaggtgggatttatttgctgtaatggaagaatacagtgttgaatatatgttaacaagtatgggataacgagatatacttaatatgcaaatgatcatgacacaaatcaatcggtacactgaagtctggctctctgaaaagcacaacagagctttgagttttgtttatccttaaatgagtacggttagccttacatgaatatacagactggactgagtgaggcacacaccactaaatggcctactttagttagttagggttagattttgggctcagcagcggtctcatagtaaagaggtctaagttccagccattttcctctctgtcataaaacagctcagtgttctgggacagttctgctttatgttttggtcacctttctggtcccacatgtgaaccacacagtagtgtctggtatcacttggcacctgtcagtatggtggactccagacacctgctcagttgtcttctgtattttaactggtctcccttggcgattctttggcacattagagtcaaggaagaccattccagaatattgtaattgcttgcatgggcaatcctgagcagctgtcatatctcagtttcaaagagaagtgtgctcaggaaaggggaggacagaggaaagccacagagtccatttttggatggtgagatgatacgcgtcatatcctttgtttctaagaattttaatctcatgtccacctgaaagacattctgagaactgtggcctagctcagtgattctcgagttatctgtcaacttaacatatttccagtgtgtcagataaatgtcttgcaagttgtacaatagtgttaggttgttttacagttcggtgctcaccccagtttctgtacctgttctgtcacccagcagtaagagagtttgtgggttggcattgatttggtctgtggctcacacatgaagcagttctactctatctggaaacagaaattttgaaacagtgatactctttgaattatgttaaatttgagcaaattggtaggaatagacaaagcctgactttaggggagccttttacacttttgatttaatttatttgatatttataaaaagtaaagtgataactcatgcttaacttatttgcttataaaaggggattataaatattagtgatggtacatatatgcaatctcagtacttgggaggctagtcctatatatgaccatttcaaaactgacaatgaataagtaagtatatatattatatatattttatataacacctatatcatatattacacacctcactgtagatgtctagtatgatacattacatagaaggtttatgagatctcttcaatatttcataagttctcttacatttagctatgaattaatactaggccacattatattggctacattttaccttttgaattagttctgtttcatgttttcatgaaaaataagtctgaactggattgctggtagtctttaacatgctttccttattacaatagttttcttgtataaattgaattgttaatagttattggtaacattttaagcaaaagtatatggaaaatatatgtaggtacaggtttctgtgtatctaggatgttcttcttattttttttttattgaaaatagattttctcacatattatatcctgattttggtttcccttctctgtactcctcccatctgatctccacctctcctctcattcagatcctgccactttctttctcttattagaaaggagcaggcttctaagagatactactgaaatataatataataaaataaaatatagtaagataacacaaaagctatctcattgaagttggacaggacaaaccaagagaaggcacaagaatcagagatccatttgctctaacactcagaagtcccataaactctaaactggaagctataatatatacaggacctggtgcagacctgtgcaggtcctgtgcatgtgtcactctgtgaattcatatcatacatgatttgctcatgctaatcttattttcgtggtgtcctgtatcccatcagtctcttaaattcttttctcctcctcttccactgagctccaagggacgatgggattggatggagatattccatgtagggctgagagtctcagggtgtctcattcattctttgtggagtatctggagtttctatgttagtttctatctgctataggaggaagcttctctgatgacgactgaacaaggccatcttattgatttgagtatggcagagtattattaggagtcattttatcactacattttgttttaagagaagcattattttgtttttgcccaagatctctgggctgtctaccttgtctcaggcattgctgggtatgggttccatctcgtggaatgggtcttcagttaaatcagacattggttggttacttgcataaaacttgtactaccattgccctagcatatcttttaggcaagagtgttgcagataaaggatttctacaatgactggcttgatgttgaaatttctcttttggaattgtgtgaaatacagcctgaagaatacttttctgtaagacatattttcaaagttcaagataggctagtgtttggcagaatatttttgctatatttaccttgcttgttgctatgatagtctgccttgtatcctctctatagacacttccttatctctctctcaacagtattatttatttatttattattcctaaactaccaatataaactaacaggccatcaagaaatcggtactataaaagtgttcccagctttgggaaattaaatcagtatttgtatgaaacagattaataaattactttgaataaatgtttataagaatttgttgattataataattacaagtctataacaaaactagattatcatgagagattgttgaacaaaagaataataacaaaaatgtcactgtttagtgttgattttcaattacatttcatctactttcctcttccttttttattctttgagaattttgtacaatgcatttggatcatctttacttctccccagcttctcccacatccatcccctctttcctacccacccaactttatactgcttatttttaattttaattattatttatatatctttaaacccataaagtagtttatgctgcccatatacttttgaaagtgtgccttacactggtgagtggtctaccccccagagccttacaaccaactctctttttcctaactacaatcacttgccaatagctcctttgctaagggtaggaattactatccaccccctgtctttatgctagaatcttgtcttttctggttctgtacaggtcttgtgcttctgaactctgaattcatatgtgctgccctgcagtatccaggcaacactttcctggtagttatctaccacctgtggcttttatagtctttctgccctctttgccatcataccaaccagggcttgggagtagagttgagatatagatgttctgtttaaggctcagctgtctgtatcgtctcttattctctgtacgttgattgttgtgggtctcagtgctaattgcaatctactgaactccaagcttctctgatgggagttgagaaattcattaatctctgtgatgctaagccatcaagacttggtttaattctgtgtccatttatcagagtaatagtactgggttcttccctagagcctctgtcctgtctagtcactggttcttggccctgataataatgccaggtatgggtttcaagttttggattgggccttaaacccaagcagaaagcgtttggttactatgatggtatttgtgctacaagtgtgtcagtgagcttgccttctcaggcaccttattgttgtagctgtcaggtttcacagctgggtaagattggtaattccttctctcctctggtacattcatgatactttccagcattataaaagaaaaccttgagggatgatgcttctaggtcagtactggtttgatttctaaatgttctgtgactcaaaagaatcttcagtaatagggtcttactgtcaagttctggagggtaaccaatagcattggaaatacctgtaatatttggggggtatgagggttgatttgtcaacaactctgaagaaggtaacccattactgatactgagcttttaagttgttattctatagtatcctgtagggtcacttttgccctgctatagaataacttcatttaaactcatgtatatattttatgaaagttgtacagtagaaagtttatgatttttttcaaaatggctttagtgttatccctcttcatagtggctcatgtaccctgctcttctatcctctccccattaaatctttcctgcaccactttgtaccactatgctctatctcgacactcttgacagccaagtttgctggctgcaaggtcccaggtatcgagtgaagccagaatcctatgagtccaaaagggaaggagatgggctgagaggaggattctgtctctggcacacacacagtcttggggcttgggcaagcggaatggaagtgggaagggggggatgcaagtagtctacctacctgggtctgcaccacatgtgtcagctatggggttcctggtggcaagcaggtatgtctacttttgaactatgtagttaagagtatgggatcagaagcgcaattctcctaagctgatgtcaatcctggttcaacttgtaactagctataactttggatgtatttttttagtacccacttttctctgtttgctgatccatataatggcatcaatggtggtaggtctcatgtggtgtaattaggaagactaggagtgagttcagatcttgcttggatcactgcttggcatttgatgagcacatggtagagactcaatgttttgtgtttcaagattgtccccacttaagtaacttcagatgacttgcacatacatggatttctatgcatatatcagtttttccctttattttgtaaatttttttggagaggactattttaaggatttgaaattttctaacttacagtactgtttggtaatctctcaaagatgaaatggccaggaagacagaacatttgatattttatttgtacattggaaacagaagtttgataggaatttgtgagtatccaatcccttactgtatgaatagtaaatctcagaacgtgaaggaaggtgatttcatattttcattgaaatgttgcattaataagtatttttattttatttttgtaagctttggtttcctctgagtaatgggattctgttcccccaaaatgaactgtgtggaaccagttatgtgacatgaaaatttatggaacagggttaattttttaaaagaaaactttttgaatgagaaagactatctttataggaaaaggagattatataattgtacctgaaatatggaatcagaaaacatggtcaaagttccaaatctagcttgctgcctagttttgtcaataaagttttatttagacacatccataagaattaacgtacccatgtccatgtctcattttatgctacagaggaagagttaagtattcgtaacaaataagatggcttataaagtccatagtttgtactttgtagctctttaccgtaaagtttgctggtgtcttctgtgactaatttgtaattagtggcatagatgcattactccattgtgagaaaatacagagatgggaccaggtagtgcatgccccttattccagaattagtcagacacagtatggggaaaccatcacgaccattgttcttagcttagtgacaggaggggtgaggacaaattagtcaacctctagtatttgattggaaaatgcaagtactttgtcagatgcagatttgtcagtggcctttgtgaaatggtctactgatttcaatagagcttttccattgtgccctggggcagatataaatcttgcattgcctttacttttagatttcaaaggaacaacttcacatggtttagaatgcctaaaatagaggggattttgttttgctgaaatacatgcttttttttttaagagaaaaatttaaaattaaatctgttttttgacaattttatacatgtacgtaatgcattctgattactcattccccacgtctccttccctacattcctccagtgcacctccttccctgtgcattcctttttgagattaatggcttttggattgcttgtgttccatttagtttaactagggccgtcaatgtgaccattgaattagagctttttaatacaggaaaaagtgtgtgtgagagcttggaaaaaaaattaaaacagcagtcctcgccaggtacaatagcctgtgcctttagtactagcactcaggatgtagaggcagaggtaaactggtcactgccagttccagaccagcttggtctacatagaaagttccaggtcatccaggaataaaacaaaattaaaaacaattaagagaactcccaatcactaatcctgaataaaatttgttggaacagttaaacatatttggtaatctatcatatttaagtttaccttacttgagatcatcaaaatgcttatttgaaattgaatccaaggaaaattaatgtttttgatctgttaaaggttgatgatgttttgtagtagggtttaaggaccagcttacttgtaacatccttgttttttttttaagatatgactctcaaatttccagaatcactagttttaacttgtagagatctagtcactggaattcattacacaatttgaatttttaatatcattctgattatagaaattatagtactgcttcttaaatgtttacagtaaaggcagttcatgtattgaggctgaaaataacccagtgataaaaagcatacttatccctttaataaatggaatcagtagtaggcagatactattactgggaagctaggtcctgaatgtactaacttaagcagcctgtgggtggtttgaatcgcttccatagcgtcatatacttgaatgcttggtcattagagagtgagcctacttcacagggattaggaggtgtggccttgttagagtaggtgtggctttattggaggaagtgtgtcgctggggtgggctttcaggtttcaaatactgaagccaggcccagtgctttattctgcctgttaccttttactttggatgtaggactgtaacctacatgccagcagcatgtctgcctgaatgccatcatgcttcaaacaggatgacaatagactaaacctcttaccgtaagcaagcccagttaaatgctttcctttataagagttgctgtggtcatggtgttttgtagtaggagaccattgactagacagagattggtaccaagagtaggttattgctgtgacaggcctgaccatgcttcttgttggtggaatatgtgctctttggaactggttttggattatggaaacagttaaatgctttaagtggggcttaattggccatactagcagaagcagggtagtcagtggtactaagagcaatgtgtatcatgatggcctggcttaaggtgtttcagaggagaagaattttattttgtggcgtagagactgttcttgtgatgtttggcaaataatgtgactgctttttgcccttgtccaaaaaaaaaaaaaaaaaaaaaaaagaaagaaagaaagaaagaaagaaagaaagaaaagactgcctgaggctcaattgaagagttttggtttaacagtgttagtagaggagatttcaaatagcctagtagtgtctgtgccaactggttattagtagcaagtctttgcagatctttaaatgaaaagttgcaagtggagcaaggaaaagtagaaaatgtacagtttgaggagaaaagagccaccaagaagtgtaatgatgctaagtcctgtattcatggagatgaacagactaaaaagcctgacactaaccctagggcaagaccccacacagcaaagcttccaattcatgaaaaggacttaaagaaaacttagggccaggtgtggtgccacagacctttaatcccagcacttgggaggctgttcaagagtagcctgttctacaaagcatgtttcaggacaaccgagcttaggcagtgaaggaaacccttgaaaaagaaagctggtgaaaatgtatttgaataagggccatgttccatccccagcaaagctacagaacttggcagccgcatggttctggctcgtgaatcaaggatcaaggatataagaagtggattatggaatctccttctgtgattaaggaaagccactagggccaggcatgtatcaggggtgtcctagagaggcctttaagtgaagctaaaacccggattgccttggagttccaaagatgttggagatgccagagccctggaatacctgctgagggaagcttctaacaagaagttgtagacttagacttttctaaacctattttattttaggttctagaacacttgtacctctctttttgctcactgagcagaggtagggaagaagaaggttcataggaaaaaaaggggtgggaacctgttcagaagtaattctttggggtgattttactcttcatcgtcagtttaccagaagtccagtctaataacaaactccaaacgtgaaacagtagcacctgctccatccagcagaaaccacaaggctcagccaaatcctcgtgagccagtggaagcaacaagaatcatccagaattcaacgggaagttcttcggggcatttctctatatgaagaccagcaaagcattgcaaggtgtagcaatgaagagtgtcctgtcactgtctgccagattctacttatattctatccaaacatcatgcaccctctcaagcatcgctccagcaaaatagcgcatgccttctcaaaatatcacatgccttctcaaaatatcacatgccttctcaaaatatcacatgccttctcacgtctgcttcagcagaacatccactcactagacagcttccagcaaaatatcatgtgatacaactgagtttctaaagaaaccagaaatttctacctcagggagtcgaaccagcccaggggaaagaagtgtgttgttgcaggagtagaaggtctgacgagccctctggtgacatcagacgtggaaatacagagtttgctgttggctgggtttgggccttgctttggtttagtatttcctcactaggctcccatccctatgcaccctctgccattgtatgttggaaggatgtaatctgcttcagtttgatttttacaagggttagaggtaagagattgccttgagtcttagaagagactttgaattttggacttttaaacagtgttgagagtgtgataggctgttgggactttttgaagttggaccgatgcgattctgcattatgatatgacttcaggcctttgggggcagggagggaaatgcggtttgactaatggactccataggctcatatatttaaatacttcgttcttaggcagtggtgttacttgatagggattaggaggtgtggccttgctggagtaggtgtggccttgctggaggaagtgtgtcactgggggtgggctctggggtttcaaatgcacaagatagacccagtgtttttctctgtctgttgccttccaatttggatgtagaactctcagctacatttcaagtaccatgtctgcttccatgcccccatgttgacaatggactaaacccctgaatgaaactcctaaatgctttctatatggactgaagacacagaccaatgcaatgaatatgagacatttgtagaataattttataagaattataattaactatgtataaaattgtgaaatatcagaaaaatataaaattattttctttcctcaaatgtccggactttgaatgaatactttatggattcagtggcaaccagtctggtttagtgaccctctgaaagtgttaaatagttcccataagaaggtcagatcagttgttcttacaaatatcactttggcttttatttcagagtttaagagatacattgtaaattaaggataatttaaataaaacctttttatttttgagataaatttgattgaggttttcttaaggaaaatgaattctgcgagacattccatgttcttgactcctattcaaaaataaaattaatggataatgcctttgcttttggtagcagtgctatttcctcatgtgttttgcttaacaattaactttattggatgcctcaaaagtggcccattaaaatttagcgtggcctcattttaagttagaagcaacccattttaggacttcattgtgactcagcaatagataccttaaagtgtaaaggctttcaagaaaatgggggtggagatagcccagtaaatgaagtgacttaaattcagattcctaggatccatataaaaaggtacatatgcaggtacaggtatatatgtaccctacagctgagccatctctccagcccagccaaacagctgccaaaaaggcaaagtcactcttagagaaaaaatattttataattattgctgaagcatgttttagttacagcttcattcacgtgttacttaagaaatatcactaaagttagagagcagctagcactgactctcttatgtgtgagtcttcacagagcgtgtgctgtggtttttcttttttttagtctgactttttcttagctctaatatataaagaatctttcaaaaggaagggacggatgaacaaaagcttagcaagaaatcaggaaaacatgtaaggacagttcacacacaaagaaagaaaaatgattctaaactgaataaaataagaagtaggagttgagggagtgatgggatgtactttctcagaaatcagaaaagggggctaactgggtgagggggagtcacctgggcgcgtctgcaagctgctagctacttggaattcttgccgaaaggttttatgtggcaaattttctttctcacaagtgtggcaaaggattctggttacacacacacacacacacacacacacacacacacacacacacacacattgttacagagtttataatagaaaattcattatactagagagcttgagtaatagaaatttatttctcaaatttctggagtctgggacctacaagagccatgtggtggagttagtgcccggtggggagcctcttcctgggttccaagtggactccttaatgtacccttacatatcagaggacagggagaagagaacacgtgcagtgtgtctaatggcatccgtcgcatcaggagggttccacccccatgagctaagtaccttccaaaagccctgtgtacaaatgccagcacaccaggagtagagtttcaacacaggagcgggaggcagacaagctgctggtttccctggctgccgcaaagcttggcctcactcctagtgtgctcctttcagtttgcctgagacccttaatgcattggtagctgaaaaactggagtatgaggaacttttctcagttcttttgcccgacttcttgtgtttagtaggtggaaacctagaatgtataaatcattatttaggaaaattacctgtgtctgattgtcatctcgctaaatatcatggctaattctgttagcgtaatctcttactattttgtttttgtggttctctttatcatctcatgctttctaccttgcttttccttgtcttttctgacctgtctttttaagtcgttgctcctttaccttgtatatcacggttttaagtcgtcaaggtctgtttaaagtaatgacacttcatgaacagtgtaaggacttttcaatataatgttatttatctatttctgtccattgtcctgccattgtttaacaatatttctcatatctagtagatatataagacctttataatattttgactttgcctgaaatattctaaagtcttaaatttgtgtgtaatgtatgatgtaatggtagtttaaaattctcttatatatttctaagtgaaaagttttctatctctgcatttcctttttcaagtgcttttaattctttccttcgtgtctgagctcatcatgtaatttgctgagctgaataagttctttcattctttgtactgagtctgctactagtaaatctcctatcatttacctaggaatctctcactgattgtattttcatacctaaaaatacattccttattgtggtcctctacagattgtagatggactctttgcagtatcttattgatatgattttactttctcctgaaatgaattctttctaatgggaagttagggattgcttatttcttatctcttggtcatgctcatttgtgctgtcagcactgtaagtcttggtccttgtcgtttgttttctgcagaggtgtgacagtgatgtgttttgttataaagggctttgtatttatttactgtttgttcagctcctttgtattagctggagccaaatcattactggttgcagatgcgttgagtttggagccttaactcccccccccaccccccatgagacctgtgctaagcctgaaaccatcagagggaggctttgtcttgagagctcagctgccagctttgaaaatgtgggtgatccttatctctgagttttcctcccctgctgcttgagaattaggctttttttgtgcctagggatctctttcaaccctgtcatgtgcttcttaggtttcttgtgggtttcctaagggccactccaccgatgactgctcaagttcttgagtgcctagaaggactttttagttcccctaacttgtttttggtatttgaaggtttggagtgtctagaaatgtatgaagaatgggagagacagggtcttttacactcatttgcaaccagagtctgaagtggtaaaaggatttctcttccaactattgcggattttttttttaaaagagctttctctcttatagtggcaaaaacatcatctttaaaaattagtgactggtcatcactaatctagtagtcatcttctactagaatttaattgttcttgaaatttccttacattctacaattttttacatttaaagtagaatattgatgtggctgcttttacttgaatggtaaacctagcttaaagtctttgaatgtccaccttgttcattgtgtcacagagctggtgagaagggacccatgtggtcttgtagccagcactcttatttttctgatggaaaattactgtgctctagctagcaagccatataaaaattagcatcttcttagttatctgcagttcttcacatttttatttggcatttagcatagtattttttatattttaggtttttttctaaataatttttactctaaggtagttatcttattgttcagactttgaactttaaaaatacttagaaaagacaaattcttcttgtgggtgttagttattttatttgttttttccagacacataagttatatgtaggtataaagaatttaatatgttatattctcaatgtgagtatagtaatttatataaaatgtagattagtacttacgaataatgtttctgtttaaattgttttaagtggccgaatatagtgtttcataaactttgtgccttgatcatagaaataagctaatcttcatcagggctttgtagcaagtagttagaaattactagccattcattcatttgaaagaacataaagatattaggtgtattctcccagggacaggtgctagcatgtgtgttttaatatttttataaatgactaaaaagtcaaagggtatagaaaaattttatgtaaactttataccttgtaaaatgctaaattctgttgccaaataaatttattaaatatagaatagtactggtttatttaaatgaaatacaattcttttttttttttttcactatttaaatgtttcattttgtgtcggccggggctccgtcccaggctgcttcatgggttctccatgggctgctggggccagtacgggtacttcttcttgaccagcttggcttctgggaagatctcattccagtcatcactggtcatctggtcaaagggaattttgttcctcgttttctccagctgcttctcacactcctgggtcctgagctgaggtccagacacaaactcagcacagctctccacatcctcctcctcctcctgtccaccagggctgtgtgtttatcctcaggcacagggatcttcagggcattatactgcttttcaaagtcatccaccaagccaggcttggccacattggccttgtagtaagcccagtcaatcgcaggtggtttctcagacagactagccaacctggggtagaaggtctcattccaggacttcagggcatttccagttgccttctggtttgggggcgtgatctacacaaaagatcccaatcaatggtttttagagcaagtttatgcccagccatcttgggatacttcaccgacccccggggggagtgctcaaatacaattcannnnnnnnnnnnnnnnnnnngcaactctggtttcttgtgttttattacgagggaattttgcactactgtatgatttgtttgatagtttttgtatctgtcatgaatgtatagagttttaggatttaccatttccttgcagtttcctcctgcctcccgctgtacttccctctgaccccttcctttatgagatgacaagaggggtgtgactgagtctgtaccggagctctgtcttggacccaaggcaggacaacgccatgcgattcccagcctttttttctattgagtagtttttccgcttgtagaattttctgtatgttctgaaaatccagataggagcctaagtacccctcctctctttccctttattgtgctgagaacttgcctttcactgggttcttgcaataccactagtaactgcttaaagccctgggaggtactgttactctctactctgcccatctcctctctataacttccctcttcccttcctgggattgttatgtgagtgtaggactcgggattgttcaggttctcatacatgcttttggtcatatctaatttagagtttggtcaatggcagactgtataattgatggtgtccttgtgaaaggttcctgttgatttatgatatcaaggctattgtgaaagtcatgctgctttgcagtacatttgtctgttgtcatcaaacctgctatgttgctaagttacaagtttgtggcccatacagttatatatactgctaaataatggatagttggtaatgatacatggttttgtttttgtgtatttactatttattattttatggtatcctattattgtaagacagttattgtgttgaagagtcatcctcctcctcctctatctcatatatctcatatatctcatatatctcatatatcttgcctaccatttatactactttttcgttgcttaatttaatcttttgtcttgttcctaatgtgccctaggcctttctaatatagagatatgtcacgtggattgcactagagcagaattaaacattttgaaattcaacctgtagcaatcgacttttcagtgcctcatccacctctgtgggcgagtgcgtgtgcacgcacacacacacacatacacacacacacacacacacacacacgattttatacacacactaaatataaccacatactgaattgtgtagtagggtatataacccaggtctctacaaatgcattttatgatgtttttacagtaataacattgtctaacaagtccaagtagtttgcagcctcagaaactgtttatagctaaccctgaaggagttaatttttaattttgaagttatattagctcactgtacccacttacagtgtaatatattgaagtaaaatttgctaacaaaatgaaacattgtaagaataaagattttaatggttctatatttcccttccctctcctccattcagcttcctgaaatacatctttgttttccaacgccaccctcctcccactttaaaaaatttatagggattcattttattttatttttaaatttcatttatccatttaattttttacaggtatacttggtaaacattcctgccactgccctgttccttctcctcctgtcccctttagcctttcccttctactatttgccttctgtattatctgtcttcattagggtttctatttctgtgacaaaaaccatgcctgaaaagcaagctggggaggaatgagtttatttagctcacatttccacattgctagtcatcactgaaggaagtcaggacaggagctgcagcagggcaggaacctggaggcaggagctgatgcagaggccatggaggggtgctgcttattggctggcttctcctggcctgctcgcctgccaccttatagaacccagggatggcaccacccatcacgagctgaccacttccctattgatcactaattgagaaagtgtcctacagctggatctcatggaggccttacatcaactgaagctccttcctctgatgacttgtgctgaggtgacacacaaaaccagcaagtgcaactgaccgtttgtcaacttgacacagaagcacatcacagttaagctgcaatctttcctttcttatttatccccaagatctcatgttaaaaacttaaataacttttaaagtcagacagtctttacaaattcaaatacattaaaatttcaggtcctttaaaatagccaatttcttttaaaatccaaagacttttaaactttaaagtctctcaattgtacattccagtaaaataaaaattaaattatttataggcttacacctaccagccaagattattgaacacttgaagcaataaggcattttacactgaatagaaaatagccctaataaatcctaaggggtgatcttgattcttaaaatttaattgaatcagtactttccccacagttaaatttatatggacatattaaatcatgtagtccactggtttgtgactatctattgcaacagtaattttgtaccagttctggtggtcacatgtctgagatgaagggtctccagagctgctctggagctctggagctctggagctctggagctgctcagagacgacaggaagggggcgcggtgggtggcgaggcctcccagctctgggcacttgctgtgggtgctgtgtgattggctgtttgttcttctgtgtcttgttcctgtgtccgaggaccctctgcatctctgccttttttcttagttagagttagagagcccctggacaatctggggtgaatggatggtttcttttctcctcttcctggtatctttttgagacagggtttcacccggtgagtcgggctagactccagtgcatagagccccagggcggtagtgtggattcatcgtgtgtgccaccaggccctgctggtttcatggttcttgctaccatcagtgaaagcttttgtgttttcaagtaaattaagacacattttccaaagactagatagaacatgcttgtctatttttgtggaccactgttcatttttttctacaaaaagataaatggagattgtcaaattctattttaaaataaaatttgaaacattaaattatttgtagcattttgactttagaaatttagtcaacatgaacattttatattaaggtacattaaagaaannnnnnnnnnnnnnnnnnnntttgcacagacatatgtggaggcaaaagcactgtacatataatataggaaaataataaatacgttgaaagagttacacaaatacctaataacttccatgtagctgacatttcttcagttctcagtggcctgaatgtgagaagaatctaagcaacttgtcgctcagacatgtacagagaaaggtgtacactttttagtttttagtagtaacctttgaagaaattcccttcactgtttggcattttttttcctcattaaaaataatccttatgtgtcaaattttgaaaatattttccaaaataaagagtggtattggacttggaagagtgcggtcctgctgtctttgtgcaacttcactgggtttttatatccaccaccctttcaaccccagtccccaatcccttctgtcttaggtgtttttgtttttgtttttgtttttgttttgctttgttgtgaagttaaaccatgaccaaagcaactcttataaaagaaaatatttaattggggctggcttacattttcagagtttcatagtttatcatcacgacaggaaacatggcagtgtgcaggctaacatggtgtggtgttggaggagtagagagttctccatcttgatctgaaagaagccagaaggagactgtttctggaagacaactaagaggaggttctcttctgcgctgggcggagcttgagcactaggagacctcaaaacctgcctacacagtgacacacttcctccaacaaggccacacctcctaacttcccatgggccaagcgtgttcacgacacaccttccaacccccaacccaaggtatgagagaaagaaggtaagaggggaggtaactttctgtagaggtccttcagggaagcccaggcttccttgtcaggatatccagtttcttcctctctcatgaccacgaaacaaaccacagcaggagcagcagcctcctcagaatgcccaggtccccctcagggctctggcaactatgccctctcaaacgttcccagaattccaaatgtcacacacgtacagagactgtctgcagctgacaaaaccgagccccccccccagcacgaggtacatcgtaatcagctgctgtgaagcagcctcatatccctcacctgggcttaaaacaaaaacacactcaccaacccgggctctttaagaaaccacgcttctcagtacagagcagaattagnnnnnnnnnnnnnnnnnnnnttccttgtttagctctgtaccccattttttaatagggttatttggttctctggagtcttaacttcttgagttctttgtatatatattggatattagccctctatcggatgtagggttggtaaagatctttccccagtaggttgccgttttgtcttattgacagtattctttgctttatggaagctttgccattttatgagatcccatttgtctaattttgatcttagagcataagtcattggtgttctgttcagaaaaatttcgcctgtgcccatgtgtttgaggcttttccccaatttctcttctattagtttcagtgtctctggttttatgtggaggtccttgatccacttggacttgagctttgtatatggagataagaatagatcaacttgcatttttctacatgttgactgcccgttgaaccagcaccatttgttgctgtctgttttctacttgatgcttcaagctcctttgtcaagatcaagtgactgtaggtgtgtgggctcatatctgggtcttcagttctattctattgatctacctgcctgtctttggcccaataccatacagttttttaaaatcactattgctctttaatacagcttgaggtcagggatggtgattcccccaaatgtcttttgttgttgagaatagttttcactatcctgggttttttgttactccaaatgaatttgcaaattgctctttctaagtctatgaagaattgagttggaatttgatggtgattgcattgaatactcaaaatgcaattcacaaaccgaatgatgctcaagaaggaagaccaaattgtggatactttgatccttcttagaaggagaacaaaatcatcttgggaggaaatatgcagaaaaagtgtggagtagagactgaaggtatgaccagtttagagactgccccaccagtcaccaaacccagacattattgtagatgtcaagaagtgcttgctgacaggagcctgatacagctagctgtatcagagaggctctaccagagcctgacaaatacagaggtggatgctcacaaccaaccattggactgagcacagggtccacaatggaggagctagagaaaggactgaaggnnnnnnnnnnnnnnnnnnnngggaggaccggaaaagggataacatttgaaatgtcaataaagaaaatatccccccccccccaaaaaaaataagaaagaaagcatctttgtagctactacacatcagaacacaattaggtgctcactgtgcagatctgagcaccggagctgggcttcctcagacagacataagcagtgcagatgtgactgcctgcctgtgaccctggcattcagacatgctagcaccagagcagctgcctccaggctcagcgcagtacctgtctactatggtgggctttgaggacagtgtgcccatgccaaccttggaaccccacgtgcacttatgcaacacactcacacacacacacagtcacacactcacactgtattcataaatttctgcatttccaaaggataagtgtagaaacaaagtaaacaaatgtatcttttcatggactgttttttgttttatcagctgtacctttgaatgtctactaaaggagtttcttctaaacttgatttttatatcaaacaaaaattcggaaattacaacagtccattttattttctctttatttcctggcagcaacaacagtgacaacaacaatgaaatgtcctagcctgctttagtacatttatttgaggctttgctttccagcagcaatgcagtattttactagtgaatcgatgctgccatcttgtggtcctttccggtagtgcagccttcataattacccctgttaggtcagctcttcaaagacagtccttaacaacaacaacttttgatttttagtttccagattttcaatgctttaaaatgttaccttagatattagtcccctatctgatttaggataggtaaagatcctttcccaatctgttgatggtctttttgtcttattgacggtgtcttttgccttgcagaaactttggagtttcattaggtcccatttgtcaattctcgatcttacagcacaagccattgctgttctgttcaggaatttttcccctgtgcccatatcttcaaggcttttccccactttctcctctataagtttcagtgtctctggttttatgtgaagttccttgatccacttagatttgaccttagtacaaggagataagtatggatcgattcgcattcttctacacgataacaaccagttgtgccagcaccagttgttgaaaatgctgtctttcttccactggatggttttagctcccttgtcgaagatcaagtgaccatagctgtgtgggttcatttctgggtcttcaattctattccattggtctacttggtctgtctctataccagtaccatgcagttttttatcacaattgctctgtagtaaagctttaggtctggcatggtgatnnnnnnnnnnnnnnnnnnnnttacataagtcttctatgggggaattgctatgttattagatagattatatgaatgtctgtggtaaatttaaatagatgtttagaattgcccataatgatttgagtagcagattttcagttctaaaatgtttgatgaatagtatgaatctaaataaattgtaaatgtaaactgtgcaatacccagttttcctttactataaaattttagacattgcttactatctatatcttgccataattactgccataaatgatagactgtgcagaattatgattcatgtactttatataggaaattagggcagaaataggtgtttttaacagactaagtggttttctagttattagcttgagaggctgaaccaggctggttgtgagtttgaggccgacctggtgtacatggtgagttggaagtcagattacgggagtaagaaaaccaacagagacacaacccccacgcacccctccatatctaagaagttgaaagagacactgaagaatgggttggtaaggaggacttgctgttctccagaaaactgggattgggtttccagcacccacatggtagctcaaaactgtatgccaggtctagggcatgacaccttcttctggcatttctagactctgcacacatgttttgcacagacatatgtggaggcaaaagcactgcacatataatataggaaaataataaatatgttgaaagacttacacaaatacctaataacttccatgtagctgacatttcttcagttctcagtggcctgaatgtgagaagaatctaagcaagttgtcgctcagacatgtacagagaaaggtgtacactttttagtttttagtagtaacctttgaagaaattcccttcactgtttggcatttttttcctcattaaaaataatccttatgtgtcaaattttgaaaatattttccaaaataaagagtggtattggacttggaagagtgcggtcctgctgtctttgtgcaacttcactgggtttttatatccatcaccctttcaaccccaattccttctgtcttaggtgtttttgttttgttttgttgtgaagttaaaccatgaccaaagcaactcttataaaagaaaatatttaattggggctggcttacattttcagaatttcatagtttatcatcacgacaggaaacatggcagtgtgcaggctaacatggtgtggtgttggaggagtagagagttctccatcttgatctgaaagaagccagaaggagactgtttctggaagacagctaagaggaggttctcttctgcactgggcggagcttaagcactaggagacctcaaaacctgcctacacagtgacacacttcctccaacaaggccacacctcctaacagtacacttcccatgggccaagcgtgttcacgacacaccttccaacccccaacccaaggtatgagagaaagaaggtaagaggggaggtaactttctgtagaggtccttcaggtaagcccaggcttccttgtcaggatatccagtttcttcctctctcatgaccacgaaacaaaccacagcaggagcagcagcctcctcagaatgcccaggtccccctcagggctctggcaactatgccctctcaaacgttcccagaattccaaatgtcacacacgtacaaaaccgagccccccccccccccccccagcacgaggtacatcgtaatcagctgctgtgaagcagcctcatatccctcaccagggcttaaaacaaaaatacactcaccaacccggctctttaagaaaccacgcttctcagtacagagcagaattagtatttgcttagcctgttttcttccagcaatgtactgagtatttcttgtttcatttattattagaacaactttacggatcagtatttctagtatttctgcgttttgtaggagataaattgaagcatgaaatgatgaaaccgacggatcctgcttgttaaagtgtggagtgcagacagccctgcttcactaaagtgcagacaggtgacttgtcatgctgcctccagagatgcaaacgggccctgaacctgtggtccccttgagcttaatcccaggcaggcaggcttgctttcctgaggccctggcagggcctctgcagtcatgggtgctggaagacagaagtcaatttcaagtacagggtagtaagctccagccgagccttggacagtgtatggttttggagccatatcacatttgtgtcaagaaaggagacagaactatgcaaccatttcatatattaaaagatgggttattgaaactagctacactcttcctctaaattaaagtatgaaaatattgagttaggtcataaaatataaccttgatgaaagaaataatacccagcatacactttgaattttatgaaagtttactaaatgaagaacattgttaagttaccttgactactgtggtttttgtgatacaccaaatatgaaatcttataggaaatatttttttattaggtatttatttcatttacatttccaatgctatcccaaaagtccccccaacactcccccacctactttcctcccacccactcccactttttggccctggtgttcccctgtactgaggcagataaagtttgcacaaccaattggcctctctttccactgatggccaactaggccatcttctgattcatatgcagctagagacaggagctctggggagtactgggtagttcatattgttgttctacctatagggttgcagatccccccagctccttgggtactttctctagttcctccattgggggccctgtgatccatccaataactgcctgtgagcatccacttctgtgtttcctaggccccggcatagtctcacaagagacagctatatctgggtcctttcagcaaaatcttgctagtgtacgcaatggtgtcagcgtttggaagctgattatgggatggatccccggatatggcagtctctagatggtccatcctttcgtcacagctccaaactttgtctctgtaactccttccatgggtgttttgttcccacttctaagaaggggcaaagtgtccacactttggtctttgttcttcagtttcatgtgtttagcaaattgtatcttatatcttgggtattctaattttctgggctaatatccacttatcagtgagtacatattgtgagagttcctttgtgattgggttacctcactcaggatgatgccctctagggccatccatttggctaggaatttcataaattcattgtttttaatagctgagtagtactccattgtgtagatgtaccacattttctgtatccattcctctgttgaggggcatttgggttctttccagcttctggctattataaatagggctgctatgaacatagtggagcatgtgtccttcttaccagttgggacatcttctggatatatgcccaggagaggtattgcgggatcctccggtagtactatgtcagattttctgaggaaccgccagactgatttccagagtggttgtacaagcctgcaatcccaccaacaatggaggagtgttcctctttgtccacatcctcgccagcatctgctgccacctgaatttttgatcttagccattctgactggtgtgaggtagaatcttaggtttgttttgatttgcatttccctgatgattaaggatgttgaacattttttcaggtgcttctcatccattcggtattcctcaggtgagaattctttgtttagctctgagccccattttttaatggggttatttgattttctggagtctaccttcttgagttctttatatatattggatattagtcccctatctgatttaggataggtaaagatcctttcccaatcttttggtggcctttttgtcttattgacgtgtcttttgccttgcagaagctttgcaattttatgaggtcctatttttcgattcacgatcttacagcacaagccattgctgttcaggaatttttcccatgtacccttatcttcgaggcttttccctactttctcctcaataagtttcagtgtctctggttttatgtggagttccttaatccacttagatttgaccttagtacaaggagataggaatggatcaatttgtattcttctataggaaatattttaaaattattatttgctcagctgttctaataaaccttccaggcttagactcttcatgggttggttcggtatggaaagcattttaatattttaaataggcaaacgattttatgatgtattgttacctatctttcatagttagtcttcaaatgtcatttttattttgttatcagagagaaacaattattgaaacaatattgaaagcattgttgttaatatctacttgtcagtgagtatataccatgtgtgttcttttttcactgggttacctcactcaggatattttctagttctatccatttccctaggaatttcataaattcattctttttaatagctgagtagtactccattgtgtaaatgtaccacattttctgtatccattcctctgttgaggggcatctgggttttttccagcttctggctattataaataaggctgctatgaacatagtggagcatgtgtccttcttacatgttggagcatcttctgggtaaatgcccaggagtggtatagctgagtcctcaggaagtactctgtgcaattttctgaaaaaccgctaaactgatttccagagtggttgtaccagctttcaatcccaccagcaatggaggagtgttccagtatctgcagcatgtgctgtcacctgagtttttgatcttagccattctgacctgtgtgaggtagaatctcagggttgttttgatttgaatctccttggtgactaaggatgttgaacatttctttaggtacttctcagccactcagtattcctcagttgagaattctttgtttggctctgtaccccgttttttaatagggttatttggttttctggagtcttaacttcttgagttctttgtatattggatattagccctctatcagatgtagggttggtaaagatctttccccagtctgttgccgttttgtcttattgacagtattctttgctttacggaagctttgccattttatgagatcccatttgtctatttttgatcttagagcataagtcattggtgttctgttcaggaaaatttcccctgtgcccatgtgtttgaggcttttccccaatttctcttctattagtttcagtgcctctggttttatgtggaggtccttgatccacttggacttgagctttgtatatggagataagaatagatcaacttgcatttttctacatgttgactgcccattgaaccagcaccatttgttgctgtctgttttctagttgatgcttcaagctcctttgtcaagatcaagtgactgtaggtgtgtgggctcatatctgggtcttcagttctattctattgatctacctgcctctctttgtcccaataccatacagttttttttaattactattgctctttaatacagcttgaggtcagggatggtgattccccaaatttcttttgttgttgagaatagttttcactatcctgggttttttgttactccaaatgaatttgcaaattgctctttctaagtctatgaagaattgagttggaatttgatggtgattgcattgaatactcaaaatgcaattcacaaacctaatgacgctcaagaaggaagaccaaattgtggatactttgatccttcttagaaggagaacaaaatcatcttgggaggaaatatgcagaaaaagtgtggagtagagactgaaggtatgaccagtttagagactgccccaccagtcaccaaacccagacattattgtagatgtcaagaagtgcttgctgacaggagcctgatacagctagctgtatcagagaggctctaccagagcctgacaaatacagaggtcgatgctcacagccaaccattggactgagcacagggtccacaatgggggagctagagaaaggactgaaggagctgaaggagcttgcagccccatagggagaacaacaatatcaaacaaccagacccccagagctcccagggactaaaccaccaaccaaagagtatacatagtgggacccatgacttcagttgtctatgtaggaggggatggccttgttggacatcagtgggaggagaggtccttggtcctatgaaggcttgatgccccattgtatgggaatgccagggcggggaggtgggagtgagtgggtgagtgggggagcacgctcatagaagcagggggagggggaatagcatagggggtttctggggccggtgggggaggacccggaaaagggataacatttgaaatgtcaataaagaaaatatgcccccccccaaaaaagaaagaaagaaagaaagaaagaaagaaagaaagaaagaaagagaaagaaagcatctttgtagctactacacatcagaacacaattaggtgctcactgtacagatctgagcaccggagctgggcttcctcagacagacataagcagtgcagatgtgactgcctgcctgtgaccctggcattcagacatgctagcaccagagcagctgcctccaggctcagcacagtacctgtctattatggtgggctttgaggacagtgtgcccatgccaaccttggaaccccacgtgcacttatgcaacacactcacacacacacagtcacacactcacactgtattcataaatttctgcatttccaaaggataagtgtagaaacaaagtaaacaaatgtatcttttcatggactgttttttgttttatcagttgtacctttgaatgtctactaaaggagtttcttctaaacttgatttttatatcaaacaaaaattcggaaattccaacagttcattttattttctctttatttcctggcagcaacaacagcgacaacaacaatgaaatgtcctagcctgctttagtacgtttatttgaggctttgctttccagcagcaatgcagtattttactagtgaatcgatgctgccatcttgtggtcttttccggtagtgcagtcttcataattatccctgttaggtcagctcttcaaagacagtccttaacaacaacaacttttgatttttagtttccaaattttaaatgctttaaaatgttaccttagatatagttttgtaaaagatttcccctagaacttttactctggccattgaaattcttaaagttgaccagcaggttgttaattttaagtatccatattgttttgtatttccttaactagcttttcaggataatagatactctgtagtgtttagttagttgtaaataagtttttgcacatttgtcttatttctgctacagactatttttctgaagttaggccttttgtgtactatgactttcatgatgatttctttgactttaagtgtgtctatttttataacaaactaaaatttgatgtaaaagacactaatgtttaatgtgttgtgaatgtatgtgtatgcaggaaaattattataacagattaatatagcagcaaaaatatcttcgatttgtacataaatcataaaaagttaacactgagaaaagcaattctaaagatagtttattattaagtgaaatatatgttgtattgagagaagtttactaaattaagactaccaccaaggacttatactcagagggactttaaacacacacacacactctctctctcttctatctatatatatatatatatatatatatatatatatatacatatgtatacacacacacacacacacacacacacacacacacacatatatatatatatatatatatagctagctttgggccatctatatgtaaaccatagaaaccatagaaccatagaaaaagttgtatttccagcttgatttctgtgtcctgcaactgaagtgtattatgtccttaggaaaagctcttatctcggtataataggcaactaaaagcagcaactgtgttgttgtgaggttgctgggacctcccttgctctgagatttttatcttataaccaatgcttcccttgggaagaaaaattctcatccatgcaggatacctgtgctcatccttttgttgttgttaagtcttttcattcacttttatgtacatttcgttcaattacacacactcatccccctctggtgtgtgtgtgtgtgtgtgtgtgtgtgtgtgactgagagagagagagagagagagagagagagagcgctcatgtgagcgtgctcatgtatccgccctcctgcctgtctctcacctccccgtctgcacttgaccctctaacccacagacttccctgtctacttttgtcatgtgttctgctttgttcagccaccttaagtccttgcacccttcccgctatcatggaccgtctacttttcaggcctctatgaacactccaaattcagcacacaaattgaaaatcttgaagatccgtgtataagacagagcaagtgtttttaggttacctcactttgtatactaattcctgtcccgtccattttccttgtcatttcactttctttagacatgaatgaagttccattatgtagaggtaccacaattccattgtatggtcatcaggtactggacatctacacagctcaattgttctagtgtggcttgttctttcttgtgtacttatggatggatttgccaaacgattctttcaactctatcttgatcacactgctgttgctgtgaagagacaccgtgaccatggcaactgttctgaaagaaagcatttaattggggcttgtttcagaggatgagaggtttagtccgttatcatcgtgacagggaacctgctatcacacagacagacactgtgctggagaaggagctgagagttctccgttctgttcgcatgcatcaggaatagagagtgatgccgggtctgcctggcttgtggtttctaagcccccagtgacacttcctccaatcaggccacacctcttcagccttctcaagtagtgccactccctgatgagcctgtgggggtcattcttagttcaaaccaccacagagtatcttctgtagcgcttgctaagtggtcatagaaacccttagtcaatttttatcatgcaaagtattttcttttcagttatgtcacataattttgctgataacagtaatatggtttggcaatagggaatccttcaatgcccttctggtcttaaaagttttggttgaataatctgttattcttatgggcctgcctttttatatgtttgttttgtttttatttgtatattgtttgaatttttaagatgtttttaagcaagacacagtaaagcctgtaaagtagactgttccgtgggcagaacaaaggtttattggagaccatattgtcaaggccgcgctgtctgcagtggagggaaggtggaaacttgctctctgcagtctccatgtattgagtggttctagtgtgagcataagtgattttttttttttttttacatttcatatgtttgctgtgcccacagtagcttgagttattggaatttagttactttatcttcatgttccatcaggaattacatattaaattttcaatctgatgtctacatatcatataggagctagtgactcagtgtggcagcaaataaaaaatatagttcagagacacacccctgccaaccgtcttcccccatccctcaagaaaccaaaacacaaagctgcagtaaaagtcccacgaagacatttaattcagagacaaggctattgcttcattgtcacatggctcctgtgtctaggttgatagagcccctgttaattcagaggatggttttctcattgacattttaaagccgacgtgctgtctgtatgtactaatagactacgtgctgtctgtatgtactaatagactacgtgctgtctgtatgtactaatagactacgtgctgtctgtatgtactaatagactctgtcctgttattttcgaagttcaagtttcagttcacacataagtggacattgatcatctcagtgagtggagatatacatgtgtatgtacataaacacgcatatatacctattcaatatatatgtttatatatgtgaatatctatataaagtgtgtgtgtgtatatatatatatatatttaatgattagtgaactcttgacaaaacaggagcataagtgattgacaccttcagctgacagccgctggtaaggacattagttgcgggtctgattgtgttcttccctttcccgtgctgtatgaaatggcataaaagaccccttctactttcacctgaaacggttagctgtgactgttcactattagagaaatagccacagtgtcacaccgcatctctgcacgagtgagcatgtgctgctctgtggatgacccaacaagctcctacgtagctcggagtgcatgtgcccgtgtaagccgaagcctgctttgtttggcttaataaaagcacaagggccggaaatgagatgagacagtaactgcctccctggtccccatgctgaagctgggtcatggctgcctggtggtagggccttgtgcagtgtgcagggctgctggccaggaggcctatggattgtcccagcctcagagatagatcagggcaagctggctttgttttggccatcctggttatcgtgggtgttcctgagccctgacatctggatgtagcaagtaaggttgaaacaatagcctgtcttttaccctggctttctgccttccagatgttttcagggtttgggtgtgtctgtctcttaacctgaggtgaaggtgttggtagtgaccttcagctctgctgctctgcaattttccatctagttggagctgactgctgatttgaaatggttgtttttgaagttgaatgaaatgcttttgaatggtaattaagtgacactaataattttattattttgtgtgtgtgtgtgtactcttgtacgatagtgcaagcatggtagtcaggacagcttgtgggagctggctctcttcttaaacctcatgggtgacagggtcaaactagagttatcaggacactctgtaagtgcattgtctaactgagccttcttgctaactcaggcagcatttaaaaccaatgcatgttttctttttgagattaaagtataatggtctcattccctctctccttcctctaatccttcccatacacccctccttgctctcttgcaaataaatggtctttattttcattaattattgttacatacatatgtgtatatgcgtgtatgttcttaaatgcataaataaactgctcagcctgcataacgttacttgtatgcatgttttcaggactgactgactggtatgatcaattactggatgatcaattactggatgatcaattactggatgatcaactactggatgatcaattactgtgctcttccctggggaagacaattccaaggaagcttttgttcatttttttaaaaatcattttggaaattttgtaagcagattaaacttatataatgtgtcatttctactgaaattaagatagcgcatcacagacagacttagaattcagtggcttttcccacaaatcatatggataattttatttttatatattatcccattaagggtatagaaaaatatgtacgtatatatactattcttaggatagtatatagactaggatgttttgctcttagtattaaatagaaaataaaactggatattataaaattttgcttactattaaatgtaggtactattatgctgtttattttatttaacaggtacctttcagatgaaggcgttgaagcttgcacaagctctcctgggaaaggcagcataaatgacatcatcctgattgctctcaatgtaggttacgtttattaactttatttagacatttttaaaatttaagctataccaatgaaaaattcatcataaactgtgttttatgataagtaaatgacttagaggagatctttaatttttgtctcttaagttacagagatacttgttaagtttagtgacctaatattagctagttgtaaatatcatatacaatacaatgaaaaggaaaaagtccactttccaactttttgtagaatccatattttgagtagcttcataatagtaagaactgacaattctttaaaacagttttccatttggtttgcgttagattagctgtagccttaatttatttgaaaacatcatttccttttccttctgtgtactcgtggttggcttgcctgtataaatgagtacctggcggcctgggaagtcagttgaggttgctgcagcgcagatgcttgtgacccgccatatgggtgctggtaactaaagccaagtcctctgcaagagcaacaagtgctggtgaccactgagcctctgcccaccctctgtatctcagggttagatgttttctttatgctcagatttttgtgttgaaaaagacaagtattattgttttcatttgtaagtaggaaaatataaatattaagaaatagcattaaaatcttgcatgcagtttaggttcaaatatttgaattattcagaaacaattaagtgcagtcttaatttgttgcacactattcagtgcttagtaagtataaaagacagtctattatctctcttgagatccatattccatagaatgaccttccacataatcttaggttttcattttgaagacagcccctcccatagtcctgaagagccccacgttgtatatggacttgtcacaggtcaggatgctcctgtcacctctgtgagcagccactatgctttagtttctgtgtgtgatggtttgctgaattacacatacctacctaccgtttcctcaccgtttgccctcaccgctgtaggttacatagcaagcagggagacagagagccttagggcaggcgctgccgctccactgcccagcggctcccttccctgtcactgcctttgcttgctgcactaggggtgttaggctggtgcagtgataggttttcatggctctggatgttaagaatatatgggatttggttattaaaacatacacagctttattgtagtccagagctatcatttgatatttggatacggcattagctttcagtaggacatagtgatgtactgttggggatttcagtggagaagaatgactaaggtagaagagtaacaaagaaatgtgctgcttcggcctctcactgtttgtttcctggagcaatgcacagatgccagtacattatttgaaaatagcaactatagtttattactagttaaagatgtttgcttagtttttgttccacaaacctgaagtaatttcttttgatcctaagcctgaatttagttttaattttctataattctattttaatgataaaatatttattttagacagatttgagaacaattggcaagaagttccttcccagtgacatcaacggtggaaaggtagagaaggtaaagaggaggctgcctctcgctccgctggcggccattacacattggggtgtgcactctgacctgacagacaggctgcacggcctcacacttaggctgctgtttcccttccctgctgttgttgaacgttattaaaagtaaaattctggtgaattttaaatgttaaaaactccatctagaaattatgaatatggtgtattagcttggcatgtgactcttgtcgcattactaacgtgcccgacaagtcctcttttctgtttgtgttgtaggttcctttgtaaactgctcctaagcttgctcagtcctttatgagtataaaagcatatggctgtgaggttattcgtttggaaaagatgtatgtttgggtctgtttcattgtgtgcttatagacaggtgttcatatggattttctcaggggcctcagttttaaatgcaggaataccttttaaaaataatcagtgagggatgaaatttcctgcacatttctgttgagttattttttaatttgaaaataaatgtataatattttagtaaagaatttaagctacgctgttggtcctgtatcgatgttagtcgagtttcttggctgtgttatagtgtcagtgtcgtgtttacgttccccagagggagtggagagcaggggtcactctcctcaccatcattctttgtacactcgtcactaccacagattctttccccatttaccttggatcttttgtttattgttaatttcaagtattcttttctgattattagtgtgtttttacaaagttctctccaatttgtttccttttttgactttttgttacagaaatatttgttctcagatgtagttttctgctgaatttgacttggtctctgaactatccctacccctgcttgagtttccagtccgtagcatgaagatgaaacctgataatttgcattttaatccttattaggagctgttggccttgggtgggagcatccttaggaaaccccccacattctaactgcaggttgggtggccgctgtggatggctgtggtggacggtaatcacaccatagtccatgccatctctatctagttgagttaagacaatgagagctcactgtagcagtgtttactgtctgcctgttgtctctgtgtccgtagactcagagctcaccttgctgctgccttgagctcaccagcagatggagaccttctttgtcttggtcactttctgagcacagttttgcttctaaagttgtgtgcagtattttttaaaggtttcttttgaaggcagttgataacaataaacaaaactttataatgtagaatattctgtgatacatattatcacttaaaacatgcttaaatgtgatgctaatttatacatagaatgaatagattaaagattcccttttatatgaaataggaatttctaggtatttctttttctgttcttcctcattgattatattttccctttgactagctgctgctgagaccaaatacaattccactcacagcaggaatgaaaaggttttgaaaacaggtttaatagaaaatttaaaagctgatacatagattgcactcattttgttggccattagaactctacatactctatttaaatgcagctgtatttaggctaaatattcaagagataaacttctagtgcacactgaagattaatgccactcactatactttgtaactttattacaaagatttactgcctagcatttcatcatggtaatagtatctgtttgttataaggatatagtctaacactaaattacatatgttacagttctagtttaaaataagctttatcttaatctgtaaataagctatagggctatattagtaagtatgttttttagattaaacattagctgtttactttgcagtgtaaattattatgtaaagcatacttaaatatgatgttaatttatatatagaatgaatagaaattgctagattgttctttttatgttctgttattgattatatttttctttcactagcagattctgacatgaagcgtagttgctggattttagtatggaataatactctttagtttaccttttatattaagaaaggaagaaagattggtaaaggagaagctgagagggaaagagagcaagctagattacgttaactctcaaacagagcagatgtgggaagcaactttacaatatttcagccaatgtcaaaacgtcaaaaggatgtttacagtatacgtctttagaggggggagctgggcatggtggcgcacgcctttaatcccagcactcgggaggcagaggcaggtagatctttgagtttgaggccagcctggtctacagagtgagttccaggatagccagggctacacagagaaaccctgtctcgtaaaaccaaaaaaaaaaaaaaaaaaaaaaaaaaaggaggcggggaagccatgagtcagatcaggtgtggagaatatgatgggaccaataacaaaccaggaagacacaagtacagccattgcctcatccagaggtgtctctaattgttaaatttagtgattcttgacaagttacttaatctttctagaggttaatatctatattattaaagtattattcctttatgccattgaaatattaaatgatcctgaacttgaaatgttcaatggcgtgtagtccacatggtgactttgttatgttcagaatggtttgtttttctctgacatctaaaagcgcccaaatgttaattaatgacctcggctgggttgctcgttactgaggtctccagaagaattcagggaaggactcaagcacagggaccgatcttcattgtctgcatttagtcctgactgtcctggagccagactggtgtttgtggtaggaccagcgatggccttagccctggtgtgactaattctgccgagtcccagtctgtctgtgacactcccatcgcagaggagacggagacagatgcttgaggactgggaacatttcccaagtagttagaagcaaggagaagagggaaccggcatcttgtaggaatttcctccgtttgttgtgtgggatttattttgaaaaagcctcccgaaagtgtcttccgcagctcctttctaggcctcagatacttcacagtgttctggagcctttccagaaagatcagccactctcttcagaggtggatgggaggaggctacatttcatctcccaaaaggccaacgtttgtgttgttgctgttacgattagtaagactaagataacactattttcatgatttggtaatttcagattagaaagagaatggaaagctagtagatttttgatccggtctgtagtctactatgtatttaatctcatttcaagatgtcttggccttcagaaaaatacttcatttggattttgcagctgaagtcttagtcattgctattatcattaattattttgagagaatatagaattgcaaaaggtaaaattactttattagtaattgtgatattttccctgagggctttctgttgtgattgtaaaaagataaatattaagacatgtcctatgggcgtgtggtgaggtgtgggggaatgggtgccttggcaggcccctgccaagtaaggatcccttccctctgaggaccagcctcatgatggtgtactatagaatagagtttatttatgccatggggaggggaagagtagtagaggcagagaaaggcagagaggggagaggagagaagtagaggctggccatggccatgtagagagagggagcaggggagtgcagagagagaggggagcaagagggcaagaggcaagagagtaagaggacgggcgagcaaccccttgtatagtaggtcaggcctacctggctgttgccaggtaaccgtcggggtggactccaggcagaatattaatgctttccccttctcattccatctgtggcattattttgaagtttttatataccatgtgtttgaccatagtttcatagatttcaagtagagacttggaaagtggttgaaaaggtagacagaggttttcttccaggtttcccactccaggctacatgttccataggctccccataggcactgcaggctacatgttccataggctccccataggcactgcaggctacatgttccataggctccccataggcactgcaggctacatgttccataggctccccataggcactccaggctacatgttccataggctccccataggcactgcaggctacatgttccataggctccccataggcactccaggctacatgttccataggctcccccccaaccccccccccccccaggccctaaatgttggagactgagtgagtgaatgtgtgtgtgtgtggtgtatgttgtgttgtgttgtgtatgagagagacacagagaggtaggcaggcaggcagggaggcaaactgacagagacgtgtgtgtgtgtgtgtgtgtgtgtgtgtgtatgttatatctcatgaaatctcttaggtttttaaggacaggatgttctgaagtacttgggacagctggtagtacacaagctggagaccannnnnnnnnnnnnnnnnnnnnnnnnnnnnnnnnnnnnnnnnnnnnnnnnnnnnnnnnnnnnnnnnnnnnnnnnnnnnnnnnnnnnnnnnnnnnnnnnnnnnnnnnnnnnnnnnnnnnnnnnnnnnnnnnnnnnnnnnnnnnnnnnnnnnnnnnnnnnnnnnnnnnnnnnnnnnnnnnnnnnnnnnnnnnnnnnnnnnnnnnnnnnnnnnnnnnnnnnnnnnnnnnnnnnnnnnnnnnnnnnnnnnnnnnnnnnnnnnnnnnnnnnnnnnnnnnnnnnnnnnnnnnnnnnnnnnnnnnnnnnnnnnnnnnnnnnnnnnnnnnnnnnnnnnnnnnnnnnnnnnnnnnnnnnnnnnnnnnnnnnnnnnnnnnnnnnnnnnnnnnnnnnnnnnnnnnnnnnnnnnnnnnnnnnnnnnnnnnnnnnnnnnnnnnnnnnnnnnnnnnnnnnnnnnnnnnnnnnnnnnnnnnnnnnnnnnnnnnnnnnnnnnnnnnnnnnnnnnnnnnnnnnnnnnnnnnnnnnnnnnnnnnnnnnnnnnnnnnnnnnnnnnnnnnnnnnnnnnnnnnnnnnnnnnnnnnnnnnnnnnnnnnnnnnnnnnnnnnnnnnnnnnnnnnnnnnnnnnnnnnnnnnnnnnnnnnnnnnnnntgttattttcatagatgtttaaaacaaagtaggcttggtaattataagagatagtgtagtttgaatgctttgtgttcagtgcagttactggagggttttgcacattgtggaagaagcctaacaggaagtgtcagatagcttagggagactgtcctgagagagggataccaatgtctcatttggttgtttctggttccctataaaccaccaaccaatcaagtaacaattactgagcaataatgtccagttaggtaaaccaaggagtttgttgtggttccttgcagaactatctgagccagttgcctatggagcaagtgttggctcaaaggcaatggcttcacggaagtgtcaccctgggcaaggtgagcatgctgtctgaatgccctgcaggtggctcggcaggttggagaatcttctccaagcgcctggactcattgtcattcagagaagtgaggactctgagcagcctctcccaggcagtttcctgtcccctcagcctagggagggcctcattaagctctctcagctctgcagggcttggtttacccgcagtctcctgagccgctctccaggaggcaaggtttcaacctgaaagaaattgatacacagcacgaacgttccagagttatttctttttaaattgtaagtcctcatcctgacagttgcatatgactttttaaaatgtgaagctgatttaatgcttcatttttgcaagctgaagtgactggtcagagcttcagcaataccaaggtgagccacaagatggcggcctagccttaaatttcagaaggaaccgtcctctttctcaagtttagatggtgaatagttttaagaaaaaacagaacagaacagaacaggtaaaaggttcaggttttaatggaaagctcttttctttcttcttggttaatatagtctgttgtaaataagagcttattagtgttccatttagtgagtgagttattaaaattaagcttgttcttatatttttcagaaaaaaaagaataaaattaggaatttgtgttttatttactagggtttagtaatgcagtccttctaagtgtagtcggatacattctgcaaactaaaacaacaataacaacaatggcactttaaaaaataagttctgcagcccaagggggctggcccaaagctttgtctgtagtgggatgtgttcttccactagctaggctgccctgtctgggctcagtgggagaggaagtgccagggtgggatacccagggtctcacctgctcaaaggagaaggggaggagggttggggaaggcttgtgggaagggtgaccaggaggagagcagtgagcaggatgtcaagtgaataggcaaaaataaataaataaataaataaataaataaataaataaaagtaagttctgtcaggagcaataaaggtcagagtgggaagtggggcctctgcgtgcagtcttcacctgctcccgtcctgtcctgggtccattgctgaaactactcaaagcagtgagggccatttggttgcaactgttgcttttgttgttcgggaatttcaaggttgggagattattcaagatattttttgtttgtttgtttttaagttttggagacagggtttcttctgtgtattcctgactcagagattcacctgcctctgcctccacagtannnnnnnnnnnnnnnnnnnnnnnnnnnnnnnnnnnnnnnnnnnnnnnnnnnnnnnnnnnnnnnnnnnnnnnnnnnnnnnnnnnnnnnnnnnnnnnnnnnnnnnnnnnnnnnnnnnnnnnnnnnnnnnnnnnnnnnnnnnnnnnnnnnnnnnnnnnnnnnnnnnnnnnnnnnnnnnnnnnnnnnnnnnnnnnnnnnnnnnnnnnnnnnnnnnnnnnnnnnnnnnnnnnnnnnnnnnnnnnnnnnnnnnnnnnnnnnnnnnnnnnnnnnnnnnnnnnnnnnnnnnnnnnnnnnnnnnnnnnnnnnnnnnnnnnnnnnnnnnnnnnnnnnnnnnnnnnnnnnnnnnnnnnnnnnnnnnnnnnnnnnnnnnnnnnnnnnnnnnnnnnnnnnnnnnnnnnnnnnnnnnnnnnnnnnnnnnnnnnnnnnnnnnnnnnnnnnnnnnnnnnnnnnnnnnnnnnnnnnnnnnnnnnnnnnnnnnnnnnnnnnnnnnnnnnnnnnnnnnnnnnnnnnnnnnnnnnnnnnnnnnnnnnnnnnnnnnnnnnnnnnnnnnnnnnnnnnnnnnnnnnnnnnnnnnnnnnnnnnnnnnnnnnnnnnnnnnnnnnnnnnnnnnnnnnnnnnnnnnnnnnnnnnnnnnnnnnnnnnnnnnnnnnnnnnnnnnnnnnnnnnnnnnnnnnnnnnnnnnnnnnnnnnnnnnnnnnnnnnnnnnnnnnnnnnnnnnnnnnnnnnnnnnnnnnnnnnnnnnnnnnnnnnnnnnnnnnnnnnnnnnnnnnnnnnnnnnnnnnnnnnnnnnnnnnnnnnnnnnnnnnnnnnnnnnnnnnnnnnnnnnnnnnnnnnnnnnnnnnnnnnnnnnnnnnnnnnnnnnnnnnnnnnnnnnnnnnnnnnnnnnnnnnnnnnnnnnnnnnnnnnnnnnnnnnnnnnnnnnnnnnnnnnnnnnnnnnnnnnnnnnnnnnnnnnnnnnnnnnnnnnnnnnnnnnnnnnnnnnnnnnnnnnnnnnnnnnnnnnnnnnnnnnnnnnnnnnnnnnnnnnnnnnnnnnnnnnnnnnnnnnnnnnnnnnnnnnnnnnnnnnnnnnnnnnnnnnnnnnnnnnnnnnnnnnnnnnnnnnnnnnnnnnnnnnnnnnnnnnnnnnnnnnnnnnnnnnnnnnnnnnnnnnnnnnnnnnnnnnnnnnnnnnnnnnnnnnnnnnnnnnnnnnnnnnnnnnnnnnnnnnnnnnnnnnnnnnnnnnnnnnnnnnnnnnnnnnnnnnnnnnnnnnnnnnnnnnnnnnnnnnnnnnnnnnnnnnnnnnnnnnnnnnnnnnnnnnnnnnnnnnnnnnnnnnnnnnnnnnnnnnnnnnnnnnnnnnnnnnnnnnnnnnnnnnnnnnnnnnnnnnnnnnnnnnnnnnnnnnnnnnnnnnnnnnnnnnnnnnnnnnnnnnnnnnnnnnnnnnnnnnnnnnnnnnnnnnnnnnnnnnnnnnnnnnnnnnnnnnnnnnnnnnnnnnnnnnnnnnnnnnnnnnnnnnnnnnnnnnnnnnnnnnnnnnnnnnnnnnnnnnnnnnnnnnnnnnnnnnnnnnnnnnnnnnnnnnnnnnnnnnnnnnnnnnnnnnnnnnnnnnnnnnnnnnnnnnnnnnnnnnnnnnnnnnnnnnnnnnnnnnnnnnnnnnnnnnnnnnnnnnnnnnnnnnnnnnnnnnnnnnnnnnnnnnnnnnnnnnnnnnnnnnnnnnnnnnnnnnnnnnnnnnnnnnnnnnnnnnnnnnnnnnnnnnnnnnnnnnnnnnnnnnnnnnnnnnnnnnnnnnnnnnnnnnnnnnnnnnnnnnnnnnnnnnnnnnnnnnnnnnnnnnnnnnnnnnnnnnnnnnnnnnnnnnnnnnnnnnnnnnnnnnnnnnnnnnnnnnnnnnnnnnnnnnnnnnnnnnnnnnnnnnnnnnnnnnnnnnnnnnnnnnnnnnnnnnnnnnnnnnnnnnnnnnnnnnnnnnnnnnnnnnnnnnnnnnnnnnnnnnnnnnnnnnnnnnnnnnnnnnnnnnnnnnnnnnnnnnnnnnnnnnnnnnnnnnnnnnnnnnnnnnnnnnnnnnnnnnnnnnnnnnnnnnnnnnnnnnnnnnnnnnnnnnnnnnnnnnnnnnnnnnnnnnnnnnnnnnnnnnnnnnnnnnnnnnnnnnnnnnnnnnnnnnnnnnnnnnnnnnnnnnnnnnnnnnnnnnnnnnnnnnnnnnnnnnnnnnnnnnnnnnnnnnnnnnnnnnnnnnnnnnnnnnnnnnnnnnnnnnnnnnnnnnnnnnnnnnnnnnnnnnnnnnnnnnnnnnnnnnnnnnnnnnnnnnnnnnnnnnnnnnnnnnnnnnnnnnnnnnnnnnnnnnnnnnnnnnnnnnnnnnnnnnnnnnnnnnnnnnnnnnnnnnnnnnnnnnnnnnnnnnnnnnnnnnnnnnnnnnnnnnnnnnnnnnnnnnnnnnnnnnnnnnnnnnnnnnnnnnnnnnnnnnnnnnnnnnnnnnnnnnnnnnnnnnnnnnnnnnnnnnnnnnnnnnnnnnnnnnnnnnnnnnnnnnnnnnnnnnnnnnnnnnnnnnnnnnnnnnnnnnnnnnnnnnnnnnnnnnnnnnnnnnnnnnnnnnnnnnnnnnnnnnnnnnnnnnnnnnnnnnnnnnnnnnnnnnnnnnnnnnnnnnnnnnnnnnnnnnnnnnnnnnnnnnnnnnnnnnnnnnnnnnnnnnnnnnnnnnnnnnnnnnnnnnnnnnnnnnnnnnnnnnnnnnnnnnnnnnnnnnnnnnnnnnnnnnnnnnnnnnnnnnnnnnnnnnnnnnnnnnnnnnnnnnnnnnnnnnnnnnnnnnnnnnnnnnnnnnnnnnnnnnnnnnnnnnnnnnnnnnnnnnnnnnnnnnnnnnnnnnnnnnnnnnnnnnnnnnnnnnnnnnnnnnnnnnnnnnnnnnnnnnnnnnnnnnnnnnnnnnnnnnnnnnnnnnnnnnnnnnnnnnnnnnnnnnnnnnnnnnnnnnnnnnnnnnnnnnnnnnnnnnnnnnnnnnnnnnnnnnnnnnnnnnnnnnnnnnnnnnnnnnnnnnnnnnnnnnnnnnnnnnnnnnnnnnnnnnnnnnnnnnnnnnnnnnnnnnnnnnnnnnnnnnnnnnnnnnnnnnnnnnnnnnnnnnnnnnnnnnnnnnnnnnnnnnnnnnnnnnnnnnnnnnnnnnnnnnnnnnnnnnnnnnnnnnnnnnnnnnnnnnnnnnnnnnnnnnnnnnnnnnnnnnnnnnnnnnnnnnnnnnnnnnnnnnnnnnnnnnnnnnnnnnnnnnnnnnnnnnnnnnnnnnnnnnnnnnnnnnnnnnnnnnnnnnnnnnnnnnnnnnnnnnnnnnnnnnnnnnnnnnnnnnnnnnnnnnnnnnnnnnnnnnnnnnnnnnnnnnnnnnnnnnnnnnnnnnnnnnnnnnnnnnnnnnnnnnnnnnnnnnnnnnnnnnnnnnnnnnnnnnnnnnnnnnnnnnnnnnnnnnnnnnnnnnnnnnnnnnnnnnnnnnnnnnnnnnnnnnnnnnnnnnnnnnnnnnnnnnnnnnnnnnnnnnnnnnnnnnnnnnnnnnnnnnnnnnnnnnnnnnnnnnnnnnnnnnnnnnnnnnnnnnnnnnnnnnnnnnnnnnnnnnnnnnnnnnnnnnnnnnnnnnnnnnnnnnnnnnnnnnnnnnnnnnnnnnnnnnnnnnnnnnnnnnnnnnnnnnnnnnnnnnnnnnnnnnnnnnnnnnnnnnnnnnnnnnnnnnnnnnnnnnnnnnnnnnnnnnnnnnnnnnnnnnnnnnnnnnnnnnnnnnnnnnnnnnnnnnnnnnnnnnnnnnnnnnnnnnnnnnnnnnnnnnnnnnnnnnnnnnnnnnnnnnnnnnnnnnnnnnnnnnnnnnnnnnnnnnnnnnnnnnnnnnnnnnnnnnnnnnnnnnnnnnnnnnnnnnnnnnnnnnnnnnnnnnnnnnnnnnnnnnnnnnnnnnnnnnnnnnnnnnnnnnnnnnnnnnnnnnnnnnnnnnnnnnnnnnnnnnnnnnnnnnnnnnnnnnnnnnnnnnnnnnnnnnnnnnnnnnnnnnnnnnnnnnnnnnnnnnnnnnnnnnnnnnnnnnnnnnnnnnnnnnnnnnnnnnnnnnnnnnnnnnnnnnnnnnnnnnnnnnnnnnnnnnnnnnnnnnnnnnnnnnnnnnnnnnnnnnnnnnnnnnnnnnnnnnnnnnnnnnnnnnnnnnnnnnnnnnnnnnnnnnnnnnnnnnnnnnnnnnnnnnnnnnnnnnnnnnnnnnnnnnnnnnnnnnnnnnnnnnnnnnnnnnnnnnnnnnnnnnnnnnnnnnnnnnnnnnnnnnnnnnnnnnnnnnnnnnnnnnnnnnnnnnnnnnnnnnnnnnnnnnnnnnnnnnnnnnnnnnnnnnnnnnnnnnnnnnnnnnnnnnnnnnnnnnnnnnnnnnnnnnnnnnnnnnnnnnnnnnnnnnnnnnnnnnnnnnnnnnnnnnnnnnnnnnnnnnnnnnnnnnnnnnnnnnnnnnnnnnnnnnnnnnnnnnnnnnnnnnnnnnnnnnnnnnnnnnnnnnnnnnnnnnnnnnnnnnnnnnnnnnnnnnnnnnnnnnnnnnnnnnnnnnnnnnnnnnnnnnnnnnnnnnnnnnnnnnnnnnnnnnnnnnnnnnnnnnnnnnnnnnnnnnnnnnnnnnnnnnnnnnnnnnnnnnnnnnnnnnnnnnnnnnnnnnnnnnnnnnnnnnnnnnnnnnnnnnnnnnnnnnnnnnnnnnnnnnnnnnnnnnnnnnnnnnnnnnnnnnnnnnnnnnnnnnnnnnnnnnnnnnnnnnnnnnnnnnnnnnnnnnnnnnnnnnnnnnnnnnnnnnnnnnnnnnnnnnnnnnnnnnnnnnnnnnnnnnnnnnnnnnnnnnnnnnnnnnnnnnnnnnnnnnnnnnnnnnnnnnnnnnnnnnnnnnnnnnnnnnnnnnnnnnnnnnnnnnnnnnnnnnnnnnnnnnnnnnnnnnnnnnnnnnnnnnnnnnnnnnnnnnnnnnnnnnnnnnnnnnnnnnnnnnnnnnnnnnnnnnnnnnnnnnnnnnnnnnnnnnnnnnnnnnnnnnnnnnnnnnnnnnnnnnnnnnnnnnnnnnnnnnnnnnnnnnnnnnnnnnnnnnnnnnnnnnnnnnnnnnnnnnnnnnnnnnnnnnnnnnnnnnnnnnnnnnnnnnnnnnnnnnnnnnnnnnnnnnnnnnnnnnnnnnnnnnnnnnnnnnnnnnnnnnnnnnnnnnnnnnnnnnnnnnnnnnnnnnnnnnnnnnnnnnnnnnnnnnnnnnnnnnnnnnnnnnnnnnnnnnnnnnnnnnnnnnnnnnnnnnnnnnnnnnnnnnnnnnnnnnnnnnnnnnnnnnnnnnnnnnnnnnnnnnnnnnnnnnnnnnnnnnnnnnnnnnnnnnnnnnnnnnnnnnnnnnnnnnnnnnnnnnnnnnnnnnnnnnnnnnnnnnnnnnnnnnnnnnnnnnnnnnnnnnnnnnnnnnnnnnnnnnnnnnnnnnnnnnnnnnnnnnnnnnnnnnnnnnnnnnnnnnnnnnnnnnnnnnnnnnnnnnnnnnnnnnnnnnnnnnnnnnnnnnnnnnnnnnnnnnnnnnnnnnnnnnnnnnnnnnnnnnnnnnnnnnnnnnnnnnnnnnnnnnnnnnnnnnnnnnnnnnnnnnnnnnnnnnnnnnnnnnnnnnnnnnnnnnnnnnnnnnnnnnnnnnnnnnnnnnnnnnnnnnnnnnnnnnnnnnnnnnnnnnnnnnnnnnnnnnnnnnnnnnnnnnnnnnnnnnnnnnnnnnnnnnnnnnnnnnnnnnnnnnnnnnnnnnnnnnnnnnnnnnnnnnnnnnnnnnnnnnnnnnnnnnnnnnnnnnnnnnnnnnnnnnnnnnnnnnnnnnnnnnnnnnnnnnnnnnnnnnnnnnnnnnnnnnnnnnnnnnnnnnnnnnnnnnnnnnnnnnnnnnnnnnnnnnnnnnnnnnnnnnnnnnnnnnnnnnnnnnnnnnnnnnnnnnnnnnnnnnnnnnnnnnnnnnnnnnnnnnnnnnnnnnnnnnnnnnnnnnnnnnnnnnnnnnnnnnnnnnnnnnnnnnnnnnnnnnnnnnnnnnnnnnnnnnnnnnnnnnnnnnnnnnnnnnnnnnnnnnnnnnnnnnnnnnnnnnnnnnnnnnnnnnnnnnnnnnnnnnnnnnnnnnnnnnnnnnnnnnnnnnnnnnnnnnnnnnnnnnnnnnnnnnnnnnnnnnnnnnnnnnnnnnnnnnnnnnnnnnnnnnnnnnnnnnnnnnnnnnnnnnnnnnnnnnnnnnnnnnnnnnnnnnnnnnnnnnnnnnnnnnnnnnnnnnnnnnnnnnnnnnnnnnnnnnnnnnnnnnnnnnnnnnnnnnnnnnnnnnnnnnnnnnnnnnnnnnnnnnnnnnnnnnnnnnnnnnnnnnnnnnnnnnnnnnnnnnnnnnnnnnnnnnnnnnnnnnnnnnnnnnnnnnnnnnnnnnnnnnnnnnnnnnnnnnnnnnnnnnnnnnnnnnnnnnnnnnnnnnnnnnnnnnnnnnnnnnnnnnnnnnnnnnnnnnnnnnnnnnnnnnnnnnnnnnnnnnnnnnnnnnnnnnnnnnnnnnnnnnnnnnnnnnnnnnnnnnnnnnnnnnnnnnnnnnnnnnnnnnnnnnnnnnnnnnnnnnnnnnnnnnnnnnnnnnnnnnnnnnnnnnnnnnnnnnnnnnnnnnnnnnnnnnnnnnnnnnnnnnnnnnnnnnnnnnnnnnnnnnnnnnnnnnnnnnnnnnnnnnnnnnnnnnnnnnnnnnnnnnnnnnnnnnnnnnnnnnnnnnnnnnnnnnnnnnnnnnnnnnnnnnnnnnnnnnnnnnnnnnnnnnnnnnnnnnnnnnnnnnnnnnnnnnnnnnnnnnnnnnnnnnnnnnnnnnnnnnnnnnnnnnnnnnnnnnnnnnnnnnnnnnnnnnnnnnnnnnnnnnnnnnnnnnnnnnnnnnnnnnnnnnnnnnnnnnnnnnnnnnnnnnnnnnnnnnnnnnnnnnnnnnnnnnnnnnnnnnnnnnnnnnnnnnnnnnnnnnnnnnnnnnnnnnnnnnnnnnnnnnnnnnnnnnnnnnnnnnnnnnnnnnnnnnnnnnnnnnnnnnnnnnnnnnnnnnnnnnnnnnnnnnnnnnnnnnnnnnnnnnnnnnnnnnnnnnnnnnnnnnnnnnnnnnnnnnnnnnnnnnnnnnnnnnnnnnnnnnnnnnnnnnnnnnnnnnnnnnnnnnnnnnnnnnnnnnnnnnnnnnnnnnnnnnnnnnnnnnnnnnnnnnnnnnnnnnnnnnnnnnnnnnnnnnnnnnnnnnnnnnnnnnnnnnnnnnnnnnnnnnnnnnnnnnnnnnnnnnnnnnnnnnnnnnnnnnnnnnnnnnnnnnnnnnnnnnnnnnnnnnnnnnnnnnnnnnnnnnnnnnnnnnnnnnnnnnnnnnnnnnnnnnnnnnnnnnnnnnnnnnnnnnnnnnnnnnnnnnnnnnnnnnnnnnnnnnnnnnnnnnnnnnnnnnnnnnnnnnnnnnnnnnnnnnnnnnnnnnnnnnnnnnnnnnnnnnnnnnnnnnnnnnnnnnnnnnnnnnnnnnnnnnnnnnnnnnnnnnnnnnnnnnnnnnnnnnnnnnnnnnnnnnnnnnnnnnnnnnnnnnnnnnnnnnnnnnnnnnnnnnnnnnnnnnnnnnnnnnnnnnnnnnnnnnnnnnnnnnnnnnnnnnnnnnnnnnnnnnnnnnnnnnnnnnnnnnnnnnnnnnnnnnnnnnnnnnnnnnnnnnnnnnnnnnnnnnnnnnnnnnnnnnnnnnnnnnnnnnnnnnnnnnnnnnnnnnnnnnnnnnnnnnnnnnnnnnnnnnnnnnnnnnnnnnnnnnnnnnnnnnnnnnnnnnnnnnnnnnnnnnnnnnnnnnnnnnnnnnnnnnnnnnnnnnnnnnnnnnnnnnnnnnnnnnnnnnnnnnnnnnnnnnnnnnnnnnnnnnnnnnnnnnnnnnnnnnnnnnnnnnnnnnnnnnnnnnnnnnnnnnnnnnnnnnnnnnnnnnnnnnnnnnnnnnnnnnnnnnnnnncagccagatcatagatttgaaagagtctttttaaagttattgaataactaattctcgtgttcagatggctaacatggctagatgactaacaaaaggattttatagattaccatggctcatataggtgatacatttctgtgtttattactggttaaatatatttttctatattaaaatttaatttaataatgatatatatttgtcctgtagagcaaaaccttataggaaagaaaggggggcattgtattcatatgctacagttggaagtactttactggctggggagggggctcagtgatgaaaagtgctcttacatttcagttcccagcactctcatggcggctcacaaccatctgtaactccagggtccatggtcctgactccatacatatacacagaacacccacagacagaaaatacatttttaaaaagaaaagttttcccttgtctttccttttttttttttttttaaccacagctttgtggggtgagattatttcttgtccacatttgttgtaacttgtggaaactgaagcttgcttatgtatgtatgtatgtatgtatgtatgtatggatgttctgattgattgcttggtcttcatttatggtgatgcacttttacttcatagctagtcctcttggaattagtttagatattagtatattgtgactaagtcatacggctccttttcagttgtggaggagtttcagtgcagctctaattactaactcctttggtttttcttttgcatcagcctgaacacaccacctggcacaaaagtgaagctctctggcactgtggacataaagaacggattcctgctcttaagtgactctaacaccacagttcttggtggtgaagtggaacacctaattgacaagtgggctttacagagagtaagtgtgcaatacaaactattagaacacaggcgctcttcccacagcaagtggcagcagtggtcttttgtgtcagggttattaagatagcacatgatcctcagtagagaaactatctgctgtgctctgacaccattcttcctcaaaaggaagtgacagttttcagtacttattacattttactcatgttttaaatgttaatattacagtatcttgacaggtttgaaatttgttagttaagaaaaggacatattagatatcctttatattagaaatgtcagatcagtgcttatataattttccaacatcccagcaagaatctttccacttaaaaccattaagtcaggtaggaacttactcagcttccaacaaagacacacagacaagcgtgcatacactcttgtccgccattctactttctgtctctatggtcttgactattggagtatctcttagacatgttatgataatagtatttgttcttttgtgtccagcttattctgagtaagataatatctatattgtaggatgtcagagtttccctccttttattggctcaatagtattccattgtttatgaacactacattttgtttattcatctgtcagtgggcattagtgttgctcctatcttttgttcactatggctaaagctgctgtgaatgtgggtgcacaaatagtagctccttttagttattttgcatgcatacttgtagaattgctggattttatggtagttttgttttattcatttaataaggttctgacttctacagtggtcatcttctcatagtacctattttctctctctctttctctctctctctctctctctctctttctgtgtgtgtgtgtgtgtgtgtatgtgaaatagaactactcctcgtttccatgtgcattatccatggcacagtgatgcgagtgtcttgttgtgaggttgttattctctactgaatcctccatgctatgctatgctttctgcattgtacacccaggttggatttacttcttcccttaggaatagcgatcctatgctatgtcgggctgggttgtgtttatatactggccaggtcactgattgtgtgtaaagggagcttaggtctggcttttgtaccttcagcagtgcaagaaataggagtctgagttgtttttaaattttcatgttaacaagaaatgttaatttatgttagcctttaaaggatgtttaagggctggtgagatggctcagtgggtaagagcacccgactgctcttccgaaggtcaggagttcaaatcccagcaaccacatggtggctcacaaccatctgtaacaagatctgacgccctcttctggagtgtctgaagacagctacagtgtacttacgtataataaataaataagtctttaaaaaaaaaaaaaaaaaaaaggatgtttaagtgcaaactgaattgatttatagctgtttacataatcctttccttgtaactgaatcgaaactgagctcagggccctggacaatcacgtgtgtgtgcctggcttcttctgtttttaaaggaaagaggttgataacgtgcatgtagattgtgaagatatgcggcatccctgtcccagttcattcccctttgctcatcaggctgacgttaagttgccattgggcttattattcactctgtagtttacatgaaatgtgtgcgcgtttacagaatgcaggagctctggaatatgttaaacagtatagtatgtggtgaatttttaaaaatacttgtgactcttttacattgtattttcatcataacatctgtaatattaattagcacaaggttcaagttcggaaggtatatttaataattgacagatgcatgttaacaccgccagtgggaagggtaagagggaatgctgttgagctgcctttggccctatggagggcgtcagaatgggaggaagtgctttgttgtttttctgattctcattagccaagcttaaaaaaacccggaactcatagagtttggaagctttcctctgttaaatactcatcagaggctcagcagggaaaggtgtttgctcagacctcatggtttgagtttgattcctgggatccacaaggacgtggggagaattgattcacgcaagttgtcctcttccctttacacacttgtgcttgttgtgtgatagtgtgttcatatacatacacatatgcatgcaaagtacaacaaaacttttaaagactcagttgcttgaatagttcttcatagtatgaatgagtataagataatttgaaaaatgttattgtgtgactttacatattatgaaccataggattctagtatttaaagtactagaaatcacccttatcagtaatagcttttttctagtaagtattaactctaaaaatgttatttttgtagagaaatttcagatattattcatctattggttatgtgcttcaaagtaaaattgttcttgtcagagcatatttttttatgaattgatgttatttgaggaggtctgctttctccaaagaacaccagcttgaaaaatatttctaaaaattaaacttgaatgtattttggtcaggagagatgaggaaagaactttcccagcttacagaaataaagaataaagtattttttgtcttgtagttagaaatgctttaaaggaggctgttgtgtctcaagattctactgtaagctctgcacttctggtatgcggggctagtgtgtttatatatgtgttttatgctttatgactgattttgtttttaaacagagcttattaaagcataacagaagcaatattggagctgaaggtggcccacctccttttctaccttttgggcaggtaaggactttgctcctggcaggtggattcagtcaagagagaatgttcttcattgtgcttaagtttggctatgtgacaaactagctcctcagatgccatagaattatattgaaacatgaaggtcaaggaatttaataatattgccctaatcccagagattgaagcaattaagaattatgtatttagaacaaattacagctaagataagttaatggaaaacagtatttaaatgacaattttaaaagtaaagagatgaaaaaaatatatgccagaacttttcccccaaattttgttcttcagcttagcctccattcaattgttcatcttagacacctaattttgttttatattgatgttttcaactacagcagcttggattattcttctataaaaaataagtaattagatgtgtagtccttaatttttaacccttagtcttaattttctattactgtaacaaaacactgtgaccaaggcaacatttaaaaggaattatttaatagaggcttaaagtttcagagagtgcaagactaccatgtcaggaaatagtggcaggcagacaagcgtgatgctggccagtagctgagtgattacatgtttatctggttggggatgggggggggagagagagagagagagagagagagagagagagagagagagagagagagagagaggtggggggcagaggcagacaagcatgattctgggcagtaactgagtgattacatgtttatctggttgggggtggggnnnnnnnnnnnnnnnnnnnnnnnnnnnnnnnnnnnnnnnnnnnnnnnnnnnnnnnnnnnnnnnnnnnnnnnnnnnnnnnnnnnnnnnnnnnnnnnnnnnnnnnnnnnnnnnnnnnnnnnnagcactccctgtggccttggcttggccttgttggccaccactacagttttaaactgttttactcctgtccttttcttacagaatgctggctaaagtgaaggcaaattgggacataaaaatttgaaattgaagcccaacattttattttgtatgttatttgaattttgtttgaaactttggtactaaaaagacacctagttgatatgaagatatgggataggaccagttgattggcatctttaaaataattgttatgaactatacttagaattaaattagagtcatttctgcatcatgggcatgtcccctctcctcttttaaagataaaggttgatagaaagtccagtgttgtggcccatgctagtaacattctgtttgtaataaaagatcccagagtgaaaatattatagtaatttaaacttgaaaatcataactgacatacttgtacaattttacttttttcctgagacatttgtaaactcttttcttaaattgcttaagatataaaagtgacttttttctagagacagttaatgatttcgttactgtacagcattgaaatgtgtattattataaatggaggactgtataacagaagatttggtttcagtgatggtatttactgttcttcactgtgacgcgcttgcgcggcatattgcagtagttggtaggctacaatcatcgtgctagccctctctgcgttgctgtaaatggcatgtttatcttggaggaaaaatactgtatttgtgtaacacacttgagaatatcttctcttctccctttcatataggcaataagctgaggaaaacctgtcactttagaggattgaactcgcgtggagctgagaattcaggggttgtttgcaaatagagacacctgttttaaattatgatattaaaagcataaaccttaaataaaacaacaaggaaactttgtatcttaattgggcatgttttcagtctttgacttacaagttccaacacattttgttacatgttattaagtgttttgcctgactcaagatactgtggtgtgatgtgaaaattgaactctaattacaaatcaaatttacctggtcttaattaatgtagatagcttgaaatctacaacagtttttaagttattaccctagaatgaaacttgggtcttgcagtccagtttgttttgtaaatgtgtggcctcatttaggtgatgtatgcatgtatgtgtgtatgtatgtatgtatgtacatacacagatacaatctttaacttagatttatttaaagtaacattgtaatcagcttcatagtttttgtgtgtgtgtggttttttatctgttttaagtctgttggatagagtggtagttttgcctttaccaatgataagaaatatgaatatttctttcgaggaaatagttcttatgaagaattgtatttcttggaatttctcttggaattactgagcgagatgaatttatttttttcagaagtgtgcatctaacgtccaagtggatagcagagagcttgatcgaagaaagacattacaagtttccctgcctgccaagcctgcaaatgataatgatgaatttgaaaagcaaagaactgctgccattgcagaggttgcaaagagcaaagaggtaagacgagggttttcgtaaacttctctgttgcgttctctgtaattcccttggtcatcactgctgctcacataacatccccagagtgctcatactcctctctctacagattggacaagcagaggaggccaattcctccgggcatcccaaggcaccttggcaatcttataaatatttctgttggcatgtaagccacccagtacccctcctttcatttctttctcagtgaaataactaaacacattttccttttgcatcatagcagagggtttcctgttattagttgagctcgtttctactttctcaagataatctccctctgtaatgcttgcttctgaaaagggagattttggggaatgagttctgagctgggatcaattagtgcatcagaattatgtcttgctagcttattttttatgttaaatagattatagcaaacatgttactcgtaggattatatgtggctctatgatgacacatgtatgtgcacacacatgcgctccatcttagaccatagttggccaagctggttttaatttcttgcttactgtttttttctttgctggttgatatttttttttttttagtttgatatgaatttttttgtgagtttcttgggtaaaatttttattcattaaaattgaaattgtttcctgtgctcagaatacaatgaaggtttgtgagtgatcactcttctacttaacttgaaagcttccctaggaaacttgacatttgcttgttcctcctcttgtcttcctacgtccagttcagagtaggaccaaaaccaaaccctctggaccagggggcccagagcatgtcgtgctgacagtgctaagctgatgtacctttgtgccctgtgggcctcagctgtcaagttagctgctgtgggggttgtaatcggtcgtatcaaacctccacagcctccctacaccctgcacggattaggacaccccattgtgacagttatcacaggtatttgtattcttcagtatgcttttcattctaaggcacttaagaccatcaaattaagtatatttttatgtagtttatatgaaatatattcatttcccccaaaatattatctgatgttttagattctaaaatttagaagaggatgtgtagtataaccttttccaaggattcatgtgcatcttaagctgtcttcctaaggtttggtttgctgtgttacaaatgtctatataatgtacgtcactgctataattaatcatgttttcttcacaagtataaagaatcatacctttttttaggacagaaacagttttcagaattctttaatttgtgtatgaaattgttgaagttctaagttaactaactcaggacttatccagtgttacccagtagcaattttaaggagtaaattgacatgtacattatggaccatctacattgtaaataacaaaatgtacagataaatttcacacagcaattttatacatatacatatacatatactgtgtgtatatatgtatgtatatgtatatatatatatatatatatatatatgtatatatatatgtgtgtgtgtatatatgtatgtatatgtatatatatgtatnnnnnnnnnnnnnnnnnnnncacatacacactgtatgcctcaggataatgaaacttgatcagtgctttgagggaggtgagaaaattaactaaggaagaatgatttatagaaaaaaggaagctgcagaaaaggctgtaaccaggaaggtgctctgtgcgagaggcaggagcagggtaatggaggcctgctgcagcacccacaagctgttgcaaagacactgacttatccttagaaatctcaagcttttgagtcttttgctcacagcaataacagcggccaatctatacctaaaagggctacttctgactgcttcattgagatgggttataaagaaggaagattggagttgtagacaagatgggagattaccaaattgattctggcaaagaagtgacagtatctttattcactctccataggctgagcaaacttggtggcttcagaaattttgaaattaggggtgcttcagagagatagagagagagagagagagagagggaattacagaatcagagaagtaaagaatgactaaagatttcacactgagatattgtcaggatatcttaaaatccagaggattagagtggggcatgtgcaagtgaaggcactctggtactacattttgaacacatgaatattgagatgcatactagatacattgttgtaatgcttaataaagagtgagctagaggagtgtaatttgagaagagctttagcatagatagcctacatttgagagttctgtgtagttggatggtttgatgcttggctcatggaatggtactattaggaggtgtggccttgatggagtgagtgtagccttattgtagtaggtgtgtcactgtgggtgtgggctttaagacccttgttctagctatctggaagccagtttttccctagtggccttcagatcaagatgtaggaatctcagcttttcccacaccatgcctgcctgaacaccatgccatgtgtccaccatgatgataatggattgaacctctgaacctgtaagtcagccccaactaaatgttgtcctttataagagttgccttagtcatttgtctgttcacagtagtaaaaccctaagactgatagtattgggctaaatcagatcaccaaaggaatgagtgtttgtagaaaagaaaaaaggtaacacacgcgataaggttttacttttggaggatagaggaatagaagtcaattcctccagattgatcactagtatagagagaaataagacaatttgggtgtgtgtcatgggtaagggagtgaggcgtgcttaccaagggtagttacttgaaaagtgttgatggttattgattgattattgatgctgggacattgaggttattgactccctatacactcacacttgtgtggtaaacatttggagtttgtaaaagtaagagagcaagcgtaatcaacagggacaaggcaaagcggtgagtggctagctggaccatgaggtgtaaaagtgtgataggcccaccatgatgtggccacactgctctgcatagtttatggctcgggagttgcagttattttaaatccttgaaacaactgaaaatgccgctctcccatttttaacccacaaaatgcaaagaaaatgttaaggaaataaaatgggtgtatttcattgtcaccaaaagcaaaagaactctggagttgtggaatataaatcttaattcaaacaagtcagactctagacaccaggtaactgtgttctaccaaagtagtaattgccatgtgcactggagcctttgccccgtgtggtcggtgctgaggtaacactgttggtgatgtcacttgagcctccagccccgggttgagtcagtgcagaggtaacactgctggtgatgtcctttaatcctcacaggactgggttgagaagcagtgaaaggggaaagtggtttgcctgagggaaggagcagaggttgccatgaactagcttgtctagacagttcaaagctgagtgtcctgtgctgcggtgcccacctcatgagcttcactcatgtctatataaaccgcgtttnnnnnnnnnnnnnnnnnnnntaacacacgcgataaggttttagttttggaggatagaggaatagaagtcaattcctccagattgatcactagtatagagagaaataagtcaatttgggtgtgtgtcatgggtaagggagtgaggagtgcttaccaagggtagttacttgaaaagtgttgatggttattgattgattgatctgggacattgaggttattgactccctctacactcacacttgtgtggtaaatatttggagtttgtaaaagtaagagagcaagcgtaatcaacagggacaaggcaaagcagtgagtggctagctggaccatgaggtgtaaaagtgtgataggcagttgtgatggtcttagggatgcctaatccacccaccatgatgtggccacactgctctgcatagtttatggctcgggagttgaagttattttaaatccttgaaacaactgaaaatgccgctctcccatttttaacccacaaaatgcaaagaaaatgttaaggaaataaaatgggtgtatttcattgtcaccaaaagcaaaagaactctggagttgtggaatataaatcttaattcaaacaagtcagactctagacaccaggtaactgtgttctaccaaagtagtaattgccatgtgcactagagcctttgccctatgtgatcagtgctgaggtaacactgttggtgatgtgcactggagcctttgccctgtgggatcggtgctgaggtaacactgttggtgatgtcctttaatcctcacaggactgggttgagaagcaatgaaaggggaaagtggtttgcctgagggaaggagcagaggttgccatgaactagcttgtctagacagttcaaagctgagtgtcctgtgctgcggtgcccacctcatgagcttcactcatgtctatataaaccgcgtttttaaaacagttagacatgtgtgtaagaaagacttttatttttgcagaaattctacaaacccaaaattgtatagtaatgtccagattcagttttacctttaagttgtatcagatttaaataacatattcaggtaatgaaaatgttgttcattaatgtatgtctagtattaatttctcattttttacattttactttacatttttatctagttcaacataatttctcaatgttgaataaattaagatgctttttattataatatattaatatataatgtataataaaatcatttataatgtgcttttcttatttaaaatatattttcaaaattattgttaataaaaaaatcaagttttaacttgcttttaattttaccaaaggtatcagacagaaaaatattatgtaataagatttctcttttgatgagtcagctgtgggatgcctttcagccatgatcttgtatcttcccaagtcagtggtctccatgttctattttctcataattattttgaaaagagatgattaatgagactaaatcaagtttcaagtttattcaaatacatcagcaaaataatgacatatatgatgaatgtaaacaaggaattaacaaatgagttatactctttgttcatgttttgtttaatttctaagattatatcatgatccacaacagacatgatatgctttaattggctattgggtcagttgagtactttgtttagaccttgagctgtagatggttctagggcttggatccaagatgtattcaaatattttactggagtaatttagacaactaatctttatgatgtctttatatcatctcattttcatctgcattgatacacatatagattggttttggtgacttaattaaaatctagtaattttctttttgccctgcctggacttgtggaaagaaaatattatgggttatagatgtttatgctctgctattggtgtcagttattttttacttgtgaaaaataattaagctttaaatgatgaacttttccagtttttaaatatctttgtttgtatggctatttaaaaatgctatttacttatgtctattttattttttccttatctagaccaagacatttggaggaggtggaggtggtgccagaagtaatctcaatattggtgctgctggtcaccgaaatagggaggttttacagaaggaaaaggcttccaagtcagagagcaagaacgaaggtgtctatagagaattggtaagtgtaacggggaacggggcagccacaaaagaaacaggatatgttctgaatagctgctgcttctcttgttttttttttctttttgtttgtttgtttgtttttaaatttcttctttgtatttttgttaggtgcgatataaattacttttttttcctgctgtggatggggaagtgtaattatttgttttgtttgtttgtttgtttttactataaaatgtatgaggtcatgttttctttgccatattattttcttaagagcttattctaatatagcataagcttttctttgtcttgttttggattttcagtgacatttactataactcagattcttccttgactgtcagtgtgggaaaacaggaagtcagaatgttgtgtcagtgtgacagtttcgctatagctatgaatgaaacgttgagtaaaagacagttaaaatggatagctggctttatgtaagtcctcagcatagctgtttctttattcctttcaggttgatgagaaagccctgaaacacataacagaaatgggcttcagtaaggaggcctcaaggcaagcgctgatggataatgccaacaacttagaagcagcactgaatgtccttctgaacagcagtaaacagaagcctgctgtgggccctcctgctagaggtatagttcatgtgccagcaagatatgggaaggaccaaggccaaggtttatactttgagggctatagcgttaggtaacactggttcttagaagctggaggcttggagacatacaggtcatgcaggctgcttctcatctctgtatgactgtgtctagtagtgactttttaatcagagttgttagaggtaagagagagaccatgatgcacgctaacttgttttgatggttatgtctagatctgtgccatttttattaaagacttaccactctctgaacttcctaaaattaaccaaacagtatcttttacttggataaactggtattgtttgagaaatagattgagaaatatccctgtacatagtataaataaccatacatatgtattttagtatgtagactgatattctaaaatttctgtgactgtgtaagatgcctttaagttacagcagtgttggcagtgttttactgtgaacagatataattatgctaagcttgataagtcaatcttagttttttgtagaaagaaaattcattttaaggtaaaatctttttaaattaaaaaaagtgatatgtgtttatttcaagtctaagttctatgttcatttgacatatattcgatagatcatatagagtagtaagagtacttcttaacagctttatttaaagcatttttattgttaaagagattcaccgaagccggtgagaagaaatatctgtatgttagctacaaggttgctgattgtgttttagtgatctcttttgctttttacacgctatgtacgtatgtatatatgtgtgtgcttttcaacctaaggaagagggaaaggcaggggtcgaggacgatcagaagacgaggaagacctgggaaccgcaagaccatcagcaccaagcacgttatttgatttcttggagtctaaaatgggaactctgaatgtggaaggtaggctaacctgaaaacaacattaaaaaaatatatcagtttctttttaaaacaaccacctcattcacagtagtacaaaattatttctattctggatggttgtttagaccttttatagtgaatttcatgtcgccaaaacataggagaaagttttgatgttgcattctgagaacaaaggccagcttacttagcttttaattgtatgtggagtaatattaccaaagtactccacccaacccttaacacatggaaagttagatgtacaaacagatagttgagttggaaaatttactgtagcatgacttcatattgcttacatcatttctgagattggtctgtctgttttcctcacatgtacctaagtgtatgaatctgttactgggaaatatcctttcccaactgtttcccatgatgtacagtaatgcgtaacataaatactgaaagggccaataagtgtgttaaagatgtatttttttacaagtttagaatatgagaaatattttcaaatattgtctttaaaattttaatgattaaaatcatgttatcttttagatttgctttttaattcagccaaataaatttagaagtaaaatacttttatttttaaatttatttttgtggatattttctttatttacatttcaaatgttatttcctttcctgtttccacccaatcctggaaatcccctatcccatctccgctacccctgcttctatgagggtgtttctccacccacccactcctgcctccctgccctagcattcccctacagtggggcatcaagccttcacaggaccaagggcctcttttcccattgatgcccaatgaagccatcttctgctacatatccagctggagccatgggtccctccaagtatactctttggttgcaaacgcttttgatacaaaattggtctatatttcatgaaaactggagtttatcattggattttacattatatatataaattttatatatacaaactatatatgcaaatatatacttacttttacatatatagtttggatgtatagattttatatatattataatatataaattatagaaaaggcattttgaaaatatttgaaaaaaatgagtgtttgaaatagtttgtagaggataactcaggagagcagtgtttactgatagaagactggcacctttgtttctattactgtgcatcaaatggctggacagtctgcagccaagggttccgttgagtttgtgagctgagctggtgtcggtgttcctctcacaggctcctgggctgtaggctgtgaagtcagctcctcacatgtgccggactgatgtgctgtgtggtggttggtttagttttgcttcttattgccggggctgctatcagctcctgcaaacagtcttcatgttgccacgtggacagtgtaaagatgcttccacagggtcagcaggggagtctgctgcatcttcccgtctcactgtttcctgactgacttctcaggatcctaagccttgcagccccaagggcccagtcacacctcttgatccgttcatctctgactcctgcatttgcatcctaaggtgtcgcctaaatcatgactatgattttatttctttttagtgggattgagggtagaattcatctgtgacttggcatatggaagtgaaatattattgtagtttataactatgccagatcatatctaattatcatattatgatattttgtgctaagccttcttatttcatgcattttaaagtttatattaaataaatgataacattcactaagtaaatagttaaatcctcttaatatgcatttctaagctccaaagttgaattattgttttgtctcataaatggcagtacgttttcagacatatttggaatttgtaatgatgtttagacctttatttggaaactttattgtcagaatgaggccaactagctgtgtgaatgggttaggcagtgctttagtcaggctgccatggagtcgctgctgattgcctgtgtcgtggttagtactgtctgagcagacattgcttccatcaactgcagcctgctgtcctaggctctaacgatatggacgccacagaggagagatctgtgttcccacacataagtatagaaagctgtacaagaaatgaatatactcatacacagacgtcattgggcttatagattttctgttctcttggccgtgagttcatggatacagtgaagaccataggattgacgagaaagcttgatttgtggttgttttcaagtgtattttttaaacataatgttttgttattctttcgttagtatactttactaagtgacaacatttttaactgaaatggagtttataggaaagagcagttgagactagtatctgattttacaatttcattgtttccttttaattggagttaaggcttagattatattacttggattatattctaatatgatatcttcactgatgacagatgttaaacatttttctatggaacatctaggaagcttttcaggattattttcacaatgtataatggatagataagcttctgaagattgttatgattccatgatttggtttaggtttatatcagcattggtatttgggtctttatagaggtgtatagacttagagcttcaagaaatgtttgtaactaggaggcatagctcagtgatcagcacttgctcagtaagactgaggccctgagttcaattttcagtaatatacaaacttgcacatatctcacacacacacacacacacatgcatgtgcacatacatgtacatataacatactccacagacatgtacacatgcacttatgtgcatgtcacacatatatgtacatgcatgcatacacacacaaaaaattctcatattatccttgaataccagagttttcagtagcatctgtgttttgattttgttcacgtcaagctgtctcaggatcttgtttagttttaggattcccaaaagtcaactggcttagccagtgtcttcagttagtttctagagctgtgatagacaccatggacgcaagcagcttggggagaaagggtctgttcacagtgcatcatgaaaggaactccccgtaggaacctgtagacaggaactgaagcagaaccatggaggaatgctgttccctgccttgctccccatggcttgctcagcctgctgtcttctgtaggatcccctgcacagggctggcagcacccacactattgggccctcccatagcaatcactgatcaagagatgcctcacagcctttcccactggccagtgtggttcccagcaagaagctggttctgggtgacttcctgtgtcattttggttatgtacttctaaactaaaattatcaaactcaaaatgctataaaatatggatctttttgggttatgacatcatgctggaaagtgggagattttatttctgaccttataagacaggtaacagtcaaactgtaggcatgctaagatcacaggaatacttacttatacttataacccatccttaattcataccattatgccaaaatatagaatacaaatatttccaatgttttgtttgacaaatattgaaggtgtatcagattctgtagtgttttaaatttattgaggagacatattatcttttaaggataagttttttttctgttaaatttaatacaaattagtaatacctttattttcatatatgtaattcctctagaagatccaggtatgctaccacttcttcagttttatttttaaatatttccacagaagtacctgatcacttcttagaccatgtcttctagcattggctttgaaagcctttccttctcagagcagcaggcagatgaacccagtgcttcatgcacacgagccaaatatgtgaaaactgagttacatctctagtccttgaggaactgtgacctggaagtggcagccacataaatacttcttcattccacatgttgtttaacgactaatttcttgtgatttccagcctgcatattgtagaaatcttaattattttacatgtattacctaggtagatattttcttaaagtaattatttagttagccataagctacagacatctagcagccaaactgccaaaggacttaggtgttaagagagtataaaataccctggaaagagattatatgggtctgtgcgttccttccagactccagcttcattagaacacttagctgggctcttaattcacaatgctctaagcatacattcctctgaagttttaaaattttctgcatgggaattgcatgccaactaattgagtattagttacttgtggaagattacctctgttgaagagactgctttctaaattaatgtcattttattgtgagcgtaatatatacataattttcttagatattttgttttactaaacacaaacttactaaaacataagcttttctttcccttttactgttgtagggttttctttatataaaatgagggatgctatgtactgagaactgctgtgctccaggagccgtgcgaaaggcttgccaacactaaatgatgttgtgatttctacgtgcttgagaaaagaactaaagaactcataagaactaaggagctaggatttgggatattttttattttccaattcataacttttttgacttggcatttctgagcaggtatttatgttggaaagagcagtcaggagctcagctttaagacataataagtctgtccaatcaaggagtgagatcaataagcagtcagacccaggtgcggagccagcggaggcactggagcagctcctgtgagtgggagcagagtgaagaggatgctgagggaaaggggagggcactgttaggtggctcacacctggctctcacacaaggaccaggcaggctgggaaagctggcctttgcattttgctgctgctgtgtatacttatgcccaccacgtttgatttcaggctatcagtgatttaaaaactaactcatacattttcatgaaactttaaaactcagcttttgtaagacgctcaagctgagtcccgcacaaccctgattgcagcctctcacaaaggtcgtgaggtggccggtttagaactcaagccagggtgtacacgggaaggaatctgacttaatcctaagggttgctgagatgacactgtaaaaatggtctctgagccgagacctgaggagatggcagagggaaaaggcctagaacacatgcacacactgcaggggttgggtgagcatccagaactgaagctgttgggagcaaggccctcatttcccccagagtacactcttctgtggtgtaggggagtggctgctgggagttgatggagaggggtcagagactgtgctaggagcatcacttaagttctcattatttcaggatttactgtgaattgtgacatatttgtccatattcctgtgatgtttggagagaagggagaagagtcaaccaaggttccccaaaagatgtgttctcattttatacagatttgttcacacggtactttttgttaaaagtatctctggcaaaaatactttgatgataattcagagttttatgagaaacttgtaaagataactcacgtttatccatgatttagagctggtagcttgactgtgtcggacctgatgggctggttatatccagctgtttactaatgtttccttggccttactcagctgtttcaacttcctaatctatacttcggagtgctgttataactatagacgaaagtgcctttatttgtttttaaatatcgagcacattctctagattgaactatttatgtacttacacctgcaaggagcaccagtgtggggtgtatttcaggcctggccctggctggagaggagccggactgtggatggattgctgtcggttacattgtttatcagaatgctcatgatttattaattcataacaatgatatgctttataacttcctaacaatggagttttacttcttaagcaagttttgggcattaaaattttaataaatttgttcatcttaagcttggtgtttagtttaatatgtattgtacctttgatagaatttaatgagcctaagaaagcaatgtatatttttgaataattaatgaaggccttatcagattaaaagaaatggtaatttatgtgtaatcacttttctggatttggtgtctttatttagcataaatgagtatcagtttggagattttggaacacacagtacttttccctttgaaagcagtaaaggtgatgtttttagttagacatgagatggctgtgtgtttttctcccttggagtattctccccctgcttgttctacatttcttttctttctttctttctttctttctttctttctttctttctttctttcttttttttttttttcatttatttgagacagggtttctctgtatagccctggctgtcctggaactcactctgtagaccaggctggcctcgaactcagaaatccacctgcctctgcctcctgggtgctgggattaaaggcgtgtgccaccatgctcggctcttgttctacatttcttattctttggggctcaactaaaatacaaagcagaagttctgagcagaagtcttagcataataagctatttcccttgagactttggttaatttaggttactttagttactacatgagtgtattgttgttcgcctcttccaattataaatagctaccacagcatagagagggttgtggtgctgtcctgtgcctgtgtgtagtgacgagcagtgttgacatcgtctgcttcaatgttcactaactcccatgagtatctgaaagaaataaagagctaagcatccctgtgctagttttcccatcagaactctgttcagggatagggctacggttacccccaatgatagttgtaattccacgtgcccttatgcattttgaggttaagtttccctaattctgtgataagggttacttcttagatgaagaaactgaggtgcttgtgagtttgggggacaaagactaggaagcgggagaagctctttatttggtttgcagcttagctctttctatgcacaggagagagcggtgttagacacttactttgtatgtgtgctacactagtctttcctataatcatttgtgcacatctgagtgtgctccagtgtgctctgatgcactcttcaccctcagaaagcagaacgcaaggtggcactttctcttttgcccttagcttagcagaggtgaaagcattaatcaggtaattgaaacttggggtttgtctcactttgaagttttcagtaattctttgagcaagtatttactgaatgtctccagtttgcttgaatctatggttgtgaaacactggaggaaataactgagtacgacctggacagacacggtataatctctgtaaaaaaaaaaaaacacacacacacacacacacaaacatacacacatacaactttatatatacaagagtatgtaatgtgtgttctaatatcttcaaattgatagtcatttatattaaataaaaccactaaatataaatatatatattcctaaatataaaatcaatctgctcagtccatgtatgtatgtatgtatgtgtatatatatgtatgttacaacaatttaagaggccatgaatttgagactggagtgggggtacatgactgtggttggaaggaggaaagggaaaagagaaaaattatgtagttatattttaattttgaaaaataaagagttgtattccaaaatttgaggggtattaaaagcttttataattaaaaaacacaccagaataaaagaataaaaaagcttgtggcactgaacagaacgagccagctgtgttcactgacttgaaagatgttgggaaatactgctaatctcgaagtaggctacagctcctgagggtagagactgttgttgtgtgtggaacatttcagtttctgcattatattaaaaagtaatgtctgagacttcagcagttgctgtgtgtgcaggtagcattactctacattttcatatctctagtgataggatagtgagggttttcagtctctaaaaatgtaaagatacatgcatttttttccattttttattaggtatttagctcatttacatttccaatgctataccaaaagtcccccatacccatccacccccactcccctacccacccactccccctttttgaccctggagttcccctgtactggggcatataaagtttgcgtgtctaatgggcctctctttccagtgatggccgactaggccatcttttgatacatatgcagctagagtcaagagctctggggtactggttagttcataatgttgatccacctatagggttgcagatccctttagctccttgggtactttctctatctcttcccttgggagccctgtgatccatccattagctgactgtgagcatccacttctgtgtttgctaggccccggcatagtctcacaagagacagctacatctgggtcctttggataaaatcttgctagtatatgcaatggtgtcagcgtttggatgctgattatggggtggatccctggatatggcagtctctacatggtccatcctttcatctcagctccaaactttgtctttgtaactccttccatgggtgttttgttcccaattctaaggaggggcatagtgtccacacttcagtcttcattcttcttgagtttcatgtgtttagcaaattgtatcttatatcttgggtatcctaggtttggggctaatatccacttatcagtgagtacatattgtgtgagttcctttgtgaatttgttacctcactcaggatgatgccctccaggtccatccatttgcctaggaatttcataaattcattctttttaatagctgagtagtactccattgtgtagatgtaccacattttctgtatccagatacatggatttttatataaattctttatattttaagtgaaaacagtatgagagtataaattttattttctaatgcatctgaatactctcttttataacgttgttattaaagtttttaataaagcattcttcctgccctacttacaagaacagaacaagcagaaaactaaagttaatattctaagtaacagtgggcatttgtggcaataagaatgaatatatcagcagttctcaacctgtgggtcatgaaccctgaaagaatatagtaaaacatacctgtgtatactatgattcataattgtagcaaaattacagttacgaactagcaatgaaaatattttatgtttgggggtcatcacaacatgaggaactgtattaaagggtcacagcattaggaaagttgagaaccactggtgtagacgggcagtggtggcacacgcctttaattccaccacttgggaggcagagacaggcggatttctgagttcaaggccagcctggtctatagggtgagttccaggacagccagggctacagagaaaaactctgtctcaaaaaaaaaaaaaacgaaggggggaaaaaaagaagcagcagcagtggtgtaaatagacacaggcgtctcattgaagtctagggctttcctggatattgatgcataaacttattaacatagttatagataatgatcaaaataatatttactgagagtttattcaagacatactactctgaatattttacagatatttgaagtacatatttatttatttgtgtgtttattgatttttaagatgagactacgaaaagttaaatatcttgcctaacattatagaagcactggattgccgacctatgatatacaacctccgtactatgctttgtctaggtgctgacttttaaagcttttaaacgttagcccagtttttcccagtggcttcagtttttctgcttgaatgtaaaatgctgatggtcttagggcagcgtttagcagtcctgacatccaaatgtagctttcaggcatccaagaggctttggcactttctggaccttgctagagtgaacagtaactatctcactggctgctttctgtttagcgtttgtgggcatgcacactggcatactgagaagccatgggctttagattcagtaagggtttagtatagctataaggctccacactctctgggtgggattcagttgacacatattactttgactcttcacttataaataataccgtgtgttcaagatataggtgtaagtagtgggtacacagattcagtttttaaaaaaattccttttaaaaacatttctatttctcatataatatatcatgattttggttttcactcccttatatataaggtaagataaagcaaagctaacacatgagagttggacaaacagacagaaggaaagagcacaggaaagagacccactccatgcacacactggactcccctaagaacactgacctgaaggccatagtatatacaaaggacccaaagagctaaaggagcactcccccccccccaaaaaaaaagagactagaataaagtaaaaggtaattttctttagatgacagagatacctgacatgtcaccatgagacagggaaccactgagctcagtttttcagttgccatctactgctgggcacggagcctgcccttgagagtcagtctcctgagaggaaactacgttctcatgcgcaggtggttgtcagttggagttttcttcagaattaggaatgggccaatgtgtccacttcttacattctaggacccaaactgatgacgagccctttagtccccgtgcatgctgcctcagtctcagtgagttcctgtgggcctcgttcaggttgaggtagagggtcgttctctggggttctctattgcctacggctcttacactctttcagcatccacactgacaggttccctgggacctgaggggatttgacagaaacctctcatgtatggctaagtgttggaaggtattttactttcttcataatgtctggatgtgggtctctgtatttcttcctgtctgctccaggaggaagcttctccgacggctgagcgagacactctttgatgtgtatggcagactgtctttagaagtcatgtagtgctttttttttagacctgtatatttggttttacactagttctctagcctatcaagtctcaggttcttggacacccaagcagtgttgggtattatgggtgtcattttgtagcgtgtcccttaagtcaaattagaaattggttagttattctcacaaatgtgagctaccattgcattggcagatcttgcagacaggacatgttttagatcagaggatttgtggctgggttggtgtttacacttctcctttggtagcctgcagagtaaattcctataccaaagacactagcaaatatgacgaaggctctatgtagtcaccagttcaacattgccatgttcagtgacttatgtaggtgttgtcttcagcagtagagtcttgctgatggcttatggagggcaaccgatagtcttgagaacagtccagcttttgttttttgttttgttttttttaggcggggggggggggtgaaaggttggggaagggggttcacatgggaccctcttggtgatgagctgtctggttgccacactgccttccccatcatttggtcatttgatttgaatcaccttcatgtgtatatatgtattttaggaggcttctactgtgatatgtttgcacattaccccacacatagcttgtaatcatacctctcctctttggagtccctccctagtcaccttcaattcatttatatggtttattatttacatttattgatatatatatatgtacatatatatacatatacatatatacatacacacatagatagattagatagatagatagatagatagatagatagatagatagatagatagatagatagatagatagaggaccattctggcatttctgtgatgaagccccgttgatcaccatggatagtatttttgatgtgtttttaagttcagtttgcaaatcttttatttagaatgttttcatctatgttcatagaggaactggtctggaccctgcttctttgctgggtctgatgaattggacagtgtttctcctgtttgtagtttgtggaacagtttgaggagctttggcattaactctagaattctgcactgaaactgttggcctggggtttttgtagttgttgttttttgcttgtttagagagttttagtgaatagttctattgtactagaggctatatgtctgtttaaccgtatctgatttggatttaactttgataaacggttttattgagaaaattatccacttcctttagaaattttgaatttggtggaggtgtatgggtttttaaagtctctggatttcctcagagtctgctgttcccttttcatctttaattttgctagtgtggatcatctctctctgccctttatagttaatttgataaggatttgacatgctttctgattttcttaaaacaccaattctttggttcactaagtctttgtattttttttttaatttttatttcttgtttatagatttcagccctaagtttgattgtttttgctatctactccttttgggtgtagtgtccttttgctctagagctttaggttacactgtttagttggtagtataaggtcactcagttctgttttgattttttttttttttatgtaggttcttagtgctatggacttgtcacttagaacagccctgtttgtgtcccataagtttgggtatgttctgtattcatttcatttgatacaagaaagtttttaaatttctttctttctttcagtccagactcattttcattcagtagtgagttgttggttttctgtgggttcctaacctttctgttgtttctagtacacagatttaatttctggtggtcagagaggatgcagagtgttattgcagctttcttgtttctgtagggatttacttcgtgtcttaagtctcttttcatttttggagaaagcttcgttcagttctgagaagaaagtatattcttttgtgtttgggtgaaaagttctgtatatatctgttaggtccatttggtttattatatcatgtggctctagaattatcagtttagactgcattacctctttattgctgaaatttgggtattgaagtcacccactcttcctgtgtcaaggtcagtatgtgacttaaactgtagtagtgtttctttaattaacttgaatactcttgtgtttggcgaatatgaagaattgcaatgttctattggtggagttttctttctgttgagtatgtagtgttcttctccaacttttctaattaggtttgttttgaagtcttattttgtcagatattaaaaaggctacattaattagcttgcttcttggatccatttccttaaactattttttccattcttttacgttgaagtgatgtctatccttaatgttaaagttccttgaatacaaccaaaggatggatcctggttttgtatccattctgttagtctgtgtcattctttggtgaattgagaccattgatgttcggagttaatctgaaattgctggtgtgtttccccacctctcttactttgccgacctggggtagttacttcttggttttccttggatgtgattgatcatttaaggttgaaatttttcttcaaatgctttatgtagagctggatttgtagacagatttatttttatcgtgtattgattcccctttctcaatttttgtcattgaaaggttttttgaatatagctgtctggcctggcagctgtggtcttgtagcatatttagaacatctgcccaggatcttctgggttttagagatcccatcaaaaaaatcaggtgttcctctttatacctttatatgtcactttgtcttttcccctttcacttcttaatattctttcatggttttcacatttaatgttttaattattatatgttatggtaaatttcttttctggtctagtctgtttgctattttgtattcttaagctctttgttaggcttgaaatttttcttctatcatattgttgaaaatattttctgtgtgtatgagctaggtgtcttcttgtatttctgttattcttagatttggtcttaccatagtgtttcagatatcctggatgttttatgctggagtcttttaaatttatcattttctttaaatggggtatccatttcttcattatacttttgctgtttaagattctttcatcctgtgtattctgtgggtgaggtttgcctctgtggctcttgtttgtgccatttccagttttctcccagattgggttttcttttgttggttcttttttcactttgaagtcttgaattgttttactcatttccttccacttttgtttgtttcttagacttctttaagggtctctgtcatattcataaagggtattttgaggtcatttcctcatgcctcagctatattgcaggtttcagggcccagtgttatggctttgctggcctccagtggagacatactagcctggccttcattaattatgtttatatgccagtgtctagccatctgggtatggggaggttgtaattctaggtgctgatagctggtcttgtctcttttggtgggtgtcttgttctttggtttctgttgctctctctgtttcttagagtgtgttgcctggtaggaacaacttctgggatcctgataggtgtggactctgtgggtttggggtaaaattgttcctggttagtgagagctgacagtcaagaatgtggatggggcctgagatcccaaagcagggtgttccagtaggatgtacctagtcccctgggaatggagtcagacagtgtggagtggccctaacaggcagtcacctacagaggtggtggtgagtctgaaggatcggatgtagagaagagggagtaatcatgatcttcagaaaagctccttgcttctgtggcctgagtggcatgtgggttcccaggcagtgccttctagagttgtggcctgggataataggatgagttgggaggaaggctaaagcagatctgttaggatgcactagagtgggaggcagacagtaggggaggctacagtagtctgtttcagagctggggataagactgcaaggctggatttagaggaatggagtgaggggtgaaatctgtaattagcctgcatcttcctttggcctgtatggcctgaaagttctctgggaatgcccactggccctgggggctggcataaagcaacagtgtggggcaggaaagtttggaggggaagatctgtgcaatccacggatataagggagggcaggggagggggaagctgcagcagtggcccactgcagagctggaaatgagactgggaacgggaaaagagctacagtcagcctatctgcttagctggctatagatcacagagtcagatgctaatggatattcaaatattaccttaaaatgaaggtgtagctgccactgtagattgaatagtttgcaaagaagcattcatactgtaaggtgcctgtttaattcagcatccttaatactgatagaagtagttgattttttttttgatttatttactattatatctaagtacactgtagctgtcttcagatgcaccagaagagaacatcagatctcattacagatggttgtgagccaccatgtggttgctggggtttgaactcaggactttcggaagagcagttggtgctcttaaccactgagacatctctccagcctgaagtagttgatttttgacaatagtctctttctggatgattcttgaatttaatacagtgctgtaaccattttacttattataaacacacattttaaaatgcatgacctgcataacagtattcactacagttcatgctagctcacagcaatgctcctggataccttttcttcttctacttcttcttcttttttttgagctgttattgtgttcatggtttgtctattttacaatactattcatcatattctgctaatctttcctgtattctgctatgtaatcttcaatgttccatgtatttccaggaagattccattttaaatcagaagcattaagataaaaaaaaaaatcctcaaatgcttctgctacttttttaatactattttcttttggctaaggtttaacagctcatgaatttattttttcatatacatttgtattactggatctgttatagattagtgtctggtgctgtttggagtgttacagtttgtattcctgcttctctgtatgagtggcagaaagtacctggattctgactataaaactgaagccacttacaggacggatggaatggcttggttccctcccctgatgcttactgtgggtgtaaaggttgtttagataataatgtaaatattttcaaggaatgtcttctctgccaaggttaatgctccctggtaatcagagacagctggagtctgggaggtgagggtgtgtctaatgtatcagcgagatggtagaatgctgtgaccttcaggacagcccttaaggcagtgggaatcctaaaaacatgagattaaaaatatatactttctcaactatacaaaatgtaaggatgcaatatgaattgtgtaaggagcttcacagatctaaagagatagctacactgagagccagcttggcagaaagttattaaggaaggacatttagattgatcccaaggcaagaatcccacccagctaagttttttttgtttatgcttataaagccaggtagattcccaaattcagggtcaacctaagacagcaaatttcggttggaatggtaatctcaggacaggatccaacccaggcaagtttacaaaggcaggcagatctccagattcttttgcagtttaagggaaaacaagtcctaaacatagcaagcccaaaagcttattccccaaatatgtttccacatctatcttgtgacaagtcaaatttgatttattttagcaacaaaattttcttgagtacactctataaggaaggaaccttagcctgttttgctaattaggcatccatgtttctgtattctgatactgtgtgaagggtgcttatgtggcataccctgattatccactgctgcttgggtctctgatatgcccttctgttgagcatattcatcatgtgtggcaccagttttctctgttccctaagtctttattcctagacaaatcctaatgtgggcaagagtctccaaaacagactaagggagagagagagatgatgcagcagttgagtgcttgcagggttttcagaggaccccagttgagttcccagttcttagcacatggattacatctgcttgtcatcccagctcgggggatctggcatgtgcacacacccatgccatatcatatactactctctctctctctctctctctctctctctcacacacacacacacacacacacataatgtatgtatatatgtatttatgtatgtgttaaaaataagccatttgaatatgttgataagatagatactcttagggaaagtgtctcataaatctagctggcaggcatttgaaggcctgggtatttctttttgtcataattaatagatggttggcctgcatatagaaacttacctagaaaataattcattttactttgaatttcaagtatagtatatatgctatgatgagttttcttttattctcttgctcatcttgccattttgaatttcaatttattgtctgtgacttagaacaaaacatcttttttattcttgttgacctaagcaatttatctgacaattcttttgccaaggactggaaacataaagctacataatgaattgggatttaacacctggagaacaatgacggtagttttcttgcaatgcaggcaataggtcaaccaaatgtcattaatgcccatctttggaaatctggttatcccaggcggtgtacaaggacctgtatcttgacactgatttatgtcaaaacaaacaaccaaaaaaaaaaaaaaaaaaacccaaacatgttcatcaaagataaatcatatatttggtaatgctgtaggcattttatatatatgtgtgtgtgtgtgtgtgtgtgtgtgtgtgtgtatgtgtgtgtgtataatagcctcacttgacatagaataaatttgcagctgttaaactacttttatcttgattcacaccattgcttaactttttaatgtgctaactaggaagacgtcatgataagtaactagaactcagaggatgctgagaggtaaggtaacaaagtatggagataggagatgttaccatagtaactgtcttcctacgtaagtttaggcatttaaaaatgagtaactatcagtgctgtcttaattctaatatgcatcgtgtccttctgccttttagaacctaagtcacagccacagcaccttcatcaaggacagcacagaggatggaatgccgagcaaaatgggatgaaggacggcactcagtcaagacatcttcctcgaaacgataccaggcagccaagaaatgagaggccacctcgctttcaaaaagacaccccaacttccaagtcaactgtagaaaacagcgtattatctagaaatagaggctccgaaaggccgagtagttcctcaggttctgatgtgtgggcagaagagaggatcaggtgtgacaggccatattctaggtatgacagaactaaagacgcttcacatcctctaggctttcagcacaacgatggtgcttttaaaaagagagagaactctatgcaaaacagaccaggaagaggccctttgtatgcagaggccaaagaaaacccacttcctccagaattcgtagattacaataatcaaagacgtgggagaagagaaaaccaaacaggtcatcctgatcactgttatgagaggaaaccacggacaatgaatagtgaagctgttagtggtctaaaaattgagaaacattttagtgtaaacactgattacccgaggcctgtgcagagcaatagtcttggtgttccaaatggagagacagctccgcctctgaaaggaaggcgcgtaggaccgattaagtcagcaggacctgtcacagctgtgccctacgatgataaaatattttataatagtgggcccaaaagaaggtctgggccaattaagcctgaaaaggtgatagaatcatctattcctgtggagtatgcaaaagtgtggaaacctggcgatgaatgttttgcactttattgggaagacaacaaggtatgactgtcgcaaacacgctgctacatgttatgcaatattctcgtggtactcttgaaattatctgtatgttttgttctgtaaacatatctgttttgagcccttaaggagatttataggtaggtaattcataaaatatttaacttttttttttttggtgaatgcttaggcagaatttgtcttggattacattcgagaaccatatgaaaagtgattaaacttagttcagccatagttcacgcagtatttgctaaattagaggtgcttactttcttgcaaattttactcatttccaaggaggaaaattatttcagtggtgcgaaattatgtgagttttcattgaaagagaatatattcagcctgtaaattagaaaagtgtatataagctagtcttcaccttgtagtaaataaattaatacttatttgctggctaaaagggactgaaagaagccatggtgggaaatgagcagatgggaaaaaggcaaaagaatagagtgatacgaatcttttcagagctgggagactaggtgggtccctcagaggaagggaacgcagaatgctgattttaatgttatgagttgaatgaggattgtgcagtgtgcgttagttgtgtctgtcacctttcctaacttcactcagatccactccttgcttcccaccgacccaaatttgtatcctgtttttaaaattttcttacacacgggggctggagagatagctcagcagatcctgaggaccaggattcaattcccagcacacacgtggcatcagtggagactataactccagccccaggggatctccaccctcatccacacaggcaagacaccagtgcacatgaaaaataaatcaataaatctttaaaaaagtattatacacatccaggtctttattgtcatttaattgttccttcctgttattccattattcttattttatatttccttccagttacctctctttctacctgttggcttttcctaacttccagacctctttgggtattgcaaatgaagcatgcatacctgatgattgaagctaatatttacaaacgagagaaaaacgtgacattggtctttattagtctggtttacctccatttacctgtgaatttctttcttttttttttttaaagatttatttattcatttattatatgtaagtacactgtagctgtcctcagacactccagaagagggagtcagatctcgttatggatggttgtgagccaccgtgtggttgctgggatttgaactcctgaccttcagaagagcagtcgggtggtcttacccactgagccatctcaccagcccacctgtgaatttcataattttgtttcccttaataactgaataatattgagtaacaaatttccattccccattcctaagctgatagacatctaggctgtttcctcttcctagctcttacggtgagtagagcgttggtgaatacggacgaacaggtgtctctagcaggatgcagagtcctctcattgccctttaagtctcatcatatggctgcgtatcgaggaagatctgctgccactcagctccacagaggctgaaccagtcggtcctctcatcggcagagagtggccgtttgtctttccctcattcatcttgacccttaactgtcatttgcttttttggaccttagcctttctgactgggataaaatgaaagtagttttaattttcatatccctgatggttaaggatattgaacatttaaaaaaaatgtttcttggccatttttttttttcatctttcgagaattctgtttagtttcatgccccattttaaaatagaatttcaaactttaaaaggctgtgccattagcttcaaggcttggagttggagtgggactgtgtgcccaacttacctttccttgctgggatttggtgtggctctggcttgcacaggttttgtacatgctgtcacaactgctgtgagttcagacatagccctgctgtgtccagaaggtaatgttttcctgcagtcatcccccaccctgggctgcttcccctcgctgtggcctgggtgcagtgtttgtgttacagctagggattagcattttatggtctcttattctctgaagtttaactagttgtggataactgtgtaagtctatatctactaaaatagcttctcagcttgatctatgaattcaacaagttagaagttgctttaatattgtttatttagcagtgtaatattacttttggcagaatagtcattttcacagtattagtctttcaatgagcatgggaaggtctttccgttttctggttggttgattggtttctgnnnnnnnnnnnnnnnnnnnntccctccctccctccctccctcccttccttccttccttccttccttccctatcagcattttcactgtgtaagtcttttacttcattggtagagttactgcaggaaactttattagaaaatattttttgtcattttattttatgtgtatgagtgtttttgcctgcatgtatatatgtataccacatatatgattggtgcctacagaggtcagtagagggggtcagaatctcctggaactaaagttacagatggttttaagcatgtacatgcctgttgcccatagagatcaaaagaaaatgcttgatttgaatattgaaagattctttatatttacctacttcatcattcagagacaaggaaaaggttgtaaatgattgtaaagcttacattgtagaccttagaaaaatgctcccaggtcagacttgtgtgtgaggttaagcactgttttctatattggatggtctgtggtgttatgagttgatctgtactaaagccagagaatgaagagattcgggttgaagtttaaccatgttggaaagacctggtaaataaggcagtctttcattgacaccctataaaacttatgcctctattagtgatagcagccctctattagctaaccactggcaagcctaaaaccaccttctttgaaaagggtatctcctggtattcttgtccactgccaaacacagaaaagatctggatagaaattatcaatcagagataaatggagcaacagtgaagaacagatctgtgtgtattccaactgaaattggcagacaagttccttctgcaaaaattgagtgttaaacaaaccataactcagtagttgctgagcactaggttggggatatgtaggttggttagttctgactctgtatgccccaaatgcctcccagaacttggcacactttttaataaaacttcaatcttaattataattgtctaaaaatgaatcagtgtgtgtgtgtgtgtgtgtgtgtgtgtaggatcaaagacaacatttcttttcaatgaaacattctagttatttatcattatggaagccaatacttaataggtactttattgaaataaagatggattaagaatttaggaaaaaaaaacaatgtgctaaattcatttgttgcctaggttgaataggtttataatgatagtccagactattgtgacattcaaaatattttgagctattatagtgtgctagaacaactggaagatcttttaaggagatcactgcacttacactgggatgtatactttctgttagatggatgtctttggattctagattatactcaagtattaaaaattgacactattcatagttatccccaaagctaccctgtctcgaaaacaaacaaacaaaatccaaaaaagaggcatatttaagacaactttcactttttttttaagataaaagcaaagatagaagtataaggaaaaaatgtgctataactaccattaggaagccatagcttaagttttactatgattatgttttggagatgttcaacaggcatattctaatgtttacataattccttacaatacttgtatttccgtagaagaactgagaatgtgaggcagttttccatctctcattacactaaaattaactcaattaatttctccctctggacttgaatattataatagccttctaattgttttccttgtctgcaatctcagatctccaaagcttttcattgatactgcagtactgtgtgtgatccattccacttaaaatcttttacctatgcatgaaatacaaactgttagtagacccttcattatactagtcctaatttgttatttgttgagcagtcatgtcatatcataattactttaaaacttgtattagtttgctgtgtgcatgtttacggctcctaacttcccctggatatacttgagttggctgaaaattctttgtttttaaatgtgttccatcgtcataggaaacttttcctgagttctcagctttttttaaatagcaggccattacaactgtatcacactgatttccatgttatagagaagttttgttgctgttgttttagcatggataacctttataaaactgaagctactttttaaaaaagaaattaaatatatggctttatttggtgctaggtttcttataaggctttttaaaaactcacgtctgtgtcagggttgtattttagagagttggaagatagaagccagacgaattgaatcctgccccctttcagttactctatgggatcacaggaagtaaaggtgaagcagttgagttgctaagcaggcatttgttttctcaggacacaggatgactgctgaatttatgtgaacttaggtaacttgaaaagtttaaagactgaaacatataatcaaacaactcccaacataatggtgagtctaaaacagtagaggaagggagggaagactgtataacaccccagcgagttgctctaaagttattagcacccagacacaagaaggaaacatcagggactaacagaatacttacaagagatgtactagttgctactataatacaaaaggaaccagctctttcctggtacatgcttagagaacccagcttttagaaggatgtgaacttgttacctagacactgtctttataggcagcactgatgtcctgtttcaaatttcttttgtgccttcagttttaccgagcagaagttgaagccttgcattcttcgggtatgacagcggtcgttaagttcacggactacggcaactatgaagaggtgctactgagcaatatcaagcctgttcagacagaggcatgggtacgtgatccaaattctgtacaaaggctactttgaagaaaataaatagctctaagagattagacatagtcatacaaaatttgcaagtgaaaaatactgagtttgtttgaaaatggctactccaattaaagattgcaactttattggaacttaaaacaaatgcattgcaattaattccatgtatactgtgttgttatatcatgctttggaaatagatacccttgcttccatgtttgacaaatatttgtatgtgtaaaattgggttttatgcatattttctttttcaaattgttactttaaatttgtctaaattatgcccaaaagttgtcaaatttcattctctataggatacatgctttgtttattattttaggtacttatacaactaagaaaagcattttaaattatatacagctttgtacattgtttaccacatgcatatctttacatatatgcatatatacagagcaactaaatatttcaacaatagtaattacttgatttattttattaccagtttgtccaagctgtgtaataactttgaccgtgttaagctcggatttctctggcctcatagagcatgtgtttgatagcactttcttgactttctatagggatttaatccacatctaagtacattagacatagacaagtgctgtcccgcagtcttccctaaagtgtcaaacacagcagagaatcacgtccctctgccagggccctcatccctcatcttgggtccctgcattatccttttgtgagctgctttcagacttggtggcttaaggattttctgaaatgttcttattggtgtcctcatcctccaatataaataaagcaagaacaaaaactcagttgcagcattcacattcagaggcatgaatatttgcccttttttatgcaagaaaagctgtcattttgtaaggtaatttatcattttaccttatagtatgatattgttggttcattgggttaagagggaatccccttcagcttcattattctaaagtttcaaagtttttctctaaaagactgatataccatcattatttaaattatatttctcctctcttgggaaaatttggtttcacatagctcacatagcttacttggtctcatgtggcagctatcttcattcccccattttctgttaatactttctaacccaattttaatggtaaaatttattatttactcactctgtacttctagaagttgaattacagctggctatttttacatgctcccagttgtttttagtcatagcattcagtgtctaagtggaagtcatatttttaatgtgtaaattatacttgctttatctagagtcttacatgatatatggtggtctcagagagcccaggctgtactcatcatgtagccaaggatgaccttaaaccaatccttctgcctctacctgtcagaccaggtgtacattcttatgccggcttcaaagtagcatttttatgtaatgtagtttttatttttttagaaatcttagtgagggattgattttactctgttctcctaaaggaagtatttggttttcttcctgtcttcttgctcttctagggcagtcagtcagacctgatgccatttgttgttccacagacattccctcatttagaggggtgtggtcctgaagggctacagtactgtcacttttctgccttaagtgttttcataacccttactttgatttttatttgtttaagtgtggctgtatgatggctttatcagatgtcagagctggtttgctgattgtatttggagccacaatcctctgttgagtactcatttataatttactttcacatattttaaagctggaatgagacacctaaactatttgtcagaagcaggataataaaatcagtgcatcttctgaaggttttgccattctttccctcctgtgtgcagagtttgcatagattaatatatactaattttcatgcagtttggactgtgggcctcactgttgaggaaaaggcagccattcttctgtctgcaagaatagttacttgagagaaacatctccttgaaatatagatgccaccagcttaacatttctcttctctccccatttaagcaatatctatgtgtgcataggtacatacataagaattcactgcagcaatacaatctatgcagatgtcagtacatgtgatgtagagtcaaggtagaattctcttagctctgagagtagttgtgttgcagtctaagagcacatttatttctgtaccttgggatcatctcaaggttaaattaatcaaagctctacaaaattataagcaaaacatctactgtaccaacaggaaggcagccttagttgaccgactcactgtacagatttaaagggctgcagaggtgcagaaaactgctaagaggtcttagcatggttgttcacttacactgtggaatcttgaactttcagcttttgccttcttgcactacatatgtgtgtatttttatgtgaaatactatgtttatttgattaagatttatgtttgttattggcgcaagatgttggaagatcacctcttaagattttcaaaaataccagtgatgatttagcaaaggtatgtttttccagtaaagcgcagaacaatcaaaaatagcttgcatttaaaccaaaaaagcctttataaaaaccagttgcttgtactgcttctcagttatgtaaggatgaatcagcaagcaaacagcatgaaatattaagagacagaaagactgagttaatagtttggttgtatggaaaattaaaataaaaactaatgctttaaatctaagtgttaatgtttttctcatgaggtttaggggttaagttggtggccaaatatttatttatttccctttccaatctggatgtgcccaccattttatttctagaacatattcagggatgatattttagacactcaaaatacatgttctgattttgaatggatacttcatttctttgaaaatgatttattaaacatcttgttgctttaaccttgaacttttgtttttattacaactagattttatatggatctttttactctgtaagatgttgttgggtattttttttattttctatttttttattggaaatagattttttcatgcaatctattctgatttcaatttcccccaactccattcagatctttcccaattcccttcctacaaatccattccctctttccttccctttgtctcattagaaaaatgggcatctaaaaataataataagataaaataagttttattttaatatctatcttgtaatgaacttcctatttatttcttgtgatatatatgttatttatagatcatttttaagtatataaatgctccagttattttcccctattcttctttctttaggactcttatagtgtcccaaaacaaaacagtaaacattctaaaataaaatagatagaaaataagcttctttttattttgtgtttgtattttgtatgatatgcacatgtgtgtgttattgaaacattatagagctctccttattttagcaagatagttgatgcactatggaaaatacatggaaaagcccattatattcattaatcctctctattgtatgagaaaacattagcaagaaaatctgctaatggtcctcaccgcaggccccttcctaattggttcctttgaactccaaaactaataagaggaaaccagtataaagatgccacaggcagtttggaaaacctgtgaaatagttggctgtgttacacagattcacccttctttttcctggacttgtttctgaactttacacttgagcactgctgtctcctgcgttttgaagtgccttcaagacttagagcctgtaagactgttaatgtcgtaagaggtgtttcagagcatgctggtatccaaggcttctcttaaaagtgttcacaacaggtacttctgtcaggaactgctgttattccacccagacaatccatggtatggtggtaatggttaatttttcgaccttaccatgcacatggtcttgggcagtaattctggaaagtagcagatgggttattggaaatcatcctatcctgtgtttttctatggggtcatttaataactcagcaaannnnnnnnnnnnnnnnnnnntgtgtatatatatatatatgtatgtatgtatgtatgtatgtatgtatgtatatatacccacaaaaatccccaccctgtatacaaaagtaagaagcatatttctggtacgtgaagttattttcattataattctttttttttaacctcttaaactcttaaactaagataccagtaggtgatgtttattccactttagtttaaagacaaaattgttgttgaagaaaatataataatgcacttatgtattaaagtcattcttttcctgcagctgacgggatggctcagtggataaaatacttgttgtaaaagctggaggacctgacgcttgctccctaacgcccacgtcaaaacccagacataatccacgggctaggagttgaagaccggagagtcctgggctcactggacagccagtgaagttcagcaaaagtctgtccccagaactaaagtgtaaagtgatagaagactgcagcatctacctccaggctccctgcatacatgcacacgtatgcacatacatacagctgcggatgtgcacagagcatacacacacatacacacacacacacacacacacacacacacacacacacacacaggcatacaaaatactaatggaaaataaaaatacatttctctatttttctatttatttcatgattacatctattgtcttgtttgattttggattttttaatatatataattttttattaggtattttcttcatttacatttcgaatgctatcccaaaagtcccctatacccccccactcccctacccacccgctcccacttcttggtcctggcactcccctgtactggggcatataaaatttgtcataccaaggggcctctctttccactaatggccaactaggctatcttctgctacatatgcagctagagtcaagagctccagggtactggttagttcatattgttgttccacctatagggttgcagacccctttagctccttggatactttctctagctcctccattgggggccctgtgttccatccaatagctgactgtgaacatccacttctgtgtttgccaggcactggcatcgcctcacaagagacagctatatcagggtcctttcagcaaattgatttcggatttttaatgcaaaatattgtcatgttgtccaagctggccttgaactctcctgggcttaaacagtcttgagtaggtagaagtataggtatattgtactatgattcaccttgcttcctatttaaacaataaaacttagcctggctgggtgtcatatgctagaaatcccagcattcaggaggctgagacaggaagttcacacatccaggatcacaggggactacttattctgcatgactaccctcacttatggaattagactctagttttgaatggaaaacacatttaaaagttactctttcaaactcaaatagcattcataaaaagtcattaattccactaaagatactttcctgaaaaaaagcctagaggaacaaggaaacccccaacttagatactgataggggagatgaggcgttggggcagacggagcagtgagctaaagaagccttgagtgggtaaggacaaggcatgtgagtcatttaattaggcgatgtgcagcttgtacagcaaatcaaagtcataggagacattaaaaggacgacaattgttatccacatttttcacttcaaaggcacttagaattatgtaacagtgaggctttgacaactagtatttagcccaaatgcctgtttgatcatagacttgccattcttgctgataaattctttgataagttagtgtctgtatgagtgctaaaaacaaaatttgctttggcctttgaagacactaaagtatgtttggttttgtcttgtttgttttttcaccatattttgggaaacttgcaaggtttaccgtgtggacagtgttcattttcttttttggtataaggtcagaaacaactgtatgtctagtttaaacctaaaacatccttttaaattatggacccagaacctcatctgtgtgtcttctttttaatgtttttaattaattttcatgatgctggtgattggacccttatccatgcatgctgtaagcacattattccacaggtgaactgcaaatggtatttaagcttccgtttaatacgtttattacatttgatgtgatttatttatttatttattatctataacctagcatcataatgatccctaccaggtgttgtgggctgtaattcagcccgttcctggagatatgaaagctgccaacatgggggaggggcttcatttacccataagtataccccatactcacaaatgcacagtcctaaaactgttcgtaacccttgaaactcagaatcattggtagaagataaagtaaatagaatattatgaagactttgaggcgtagccacaaccctctcagagtgtactacagaggtattttatgccatcattgagattatataattttcaggatctatgaaaaagtatgtcaagattttgattaaaaaatgttgtgatctctttaaatcttatttaaagaccttttcaaacagttttagactgatttgagatgccttttattgatcagtaaaagtatagattgtattattgcattcttttgtttttttctgaaggatgagattcctcccaaagtgaagtaacatggcaggtactaccctgccctgatgccttagtttaaagctattttaataatactcctcaggtttgttcctaaacttaattagagtttataaagtaatttatggtagaaattaaatattaatatcacatatcaggttagcataaaattgcctttttgcatatttgaataattctaggagacatcacattaatctattattgcttaagtttctcctttaccgatgccaacctaaagtataggcttatgaatatattatgttggttaattaaggaattaatttatgattatcatttagtgaatataatttttaacattttccataaaagcagtttttatgggtatagtgggtgagggccacagctgaagtccctggggttgtcacgtgcactttctttccctctgacgcctgaatcagcaggagagtctgtctgtaaatactgcctttctgtttgccttgaagccatgatttcactgttgtgagttctaccaccccatttcaaatatatgcagagtatatttgctgatctccttattgctgaggaaatcaaatagcaaaataaataaatatgaatgatatttttgttaagtttatttctgtgtccctgaaatttcagccttatgttaggaatgtgccttaacaatattaaatgatagttcattttatagattctgttggattggaaggtctgattttcttgaattaagtttctggtgaatttttggacaatttcacctgcatctataatggcagacaatattgtccctcactgtgtgccacaggctcagtttcttttcagttgaattctgtcagtgcagctttcggtctgtccttagtgatgttggtaaatcctgataatattgaacagtgaacatactgtacgtatttgatttttagtagagtgaattatgaataatccatttcttttaaatgtttatgttatttgtgtttccttatttaatgttattatattttcagcaatctttgatttcattctgttttcgaaacattctttctttgatttttgtctcaatttttttaatcagtctggtaggctgattgtttgtaacttaagtcacagtctgggtatacttttctggaccaattctatctgttatagaatcctatacataaggttctatcatcatatctctagcaaagagcagatttgtcctattttcctgtgagaaacactttggtgctgcagctgccaataaacttggaaactcctggcaagtgctccttgcactctagcttggaatgactgactccttcatgacctgtccttggctcggagctccactcagaaggcagaggggctgaaggcagaggggctgctgcacctgtgagaggctttcggttgccttgacaatggagggagaggttctagccaagccgctcagagcagcagcctaagaaagcgtccctgtgtttgagctacctcccgcctgaacagtctaggtttctcaactctgttctgggaacatgagtacttaaacaaatttggaaaaatgtgagtcaagtctgttttttattacagagcttccttgatttgatatcaaatgaataagaacattacgtctaccaagaaacagagttaaactacagagcttcaccaactcacttgctcatggaactctgcagttcccctttcccgagaacctgtgcagcttctctctccagctttcctatttccatcgataagatggcccctaaatatatcaaaccagtgttctccaacatcccaaggtttttaccttctctaaacaaagggcaaaatatattttctaaaaaagtcttaagacactttctgtccttatgtttttagcaattggattttattgcataaggaggatgattttattttaatttttatctaattctgcaagtttttaatatatcaattttaagaaattgttccttgggaagatttctattgtaacattccttttttttttttaaattgtaacattcctaatatggctttttctgaactgaccataatatttctatattcctacaatcaatgaggtatcttcatatgtgtttttctccaacaatctagctcctattattttgttttgtttttgtttttgttttttttgagacagggtttctctgtgtagccctggctgtcctggaactcactttttagaccagactggccatgaactcagaaatccgcctgcctctgcctcccaagtgctgggatcaaaggcgtatgccaccatttccggcttcctattattttgttaagctaccattggttatatgtacatacatacatacatacatacatacatacgtacatacatacatatatatatatacatatatatacatacatatatatgtatgtacatataaccagtgtatatatatatatatataaactgttcagatcagttaattcacctgggtgtttctaagtggagaggtagctgatgggacggcaaagccatcaagcatggctctctttctagcagcttagtgtattctcccaggtcttcagacattgtcattttgactcattagaagctgttgctttgagccgcttaggaaagagactcttgtcttcttcccagggtctctgtccttgtgttccttgcgccattccttaaatcagatgagtgcatgatccagagcttcacttcctagtttgtctctgttggaggaggaaggctatccttacgttaaaaaatacccaccttgccgatacttaaaaagcaagtcagagctagctgctggatacagctggtatccaacaaaaggaatcatagaaataataagtgatcacatactgtaggtacaacctttcctaaagctgatagcatcagagttttacatttatataaaaactgagttgggactcacacagtgaacgtcagtaattactgagtaattaatataattgcagtatcaaaaactccttcaacatcacagctccatatggtaatttctcccaaggactgtgttatttttgtgtaaaagactgtaatcattttggaaaataggttgcttgtttatgtgacatgggaggtcttctctctagtactggtaagatgatcctctgaaatgacagtctggcagcgtggcttggggttacagctgttggagcgtatgtcacatgaagggatagtgtagagaaattaaccttggaaggcaatattggttttctgagactcttgatttttttttgataatctctggtattttaaaaattatgaataaatacattttattttctcagatggtataagtaggatattagggtcactcctttgagttatgacttacaaagagcttattatgcaaagtatgggattagaatttagcttaatttagctctgtatggttcaaactctaaaaattgtgatcatataatctttttaaatgttgacaattatttttagtaccacttaatgaatgtcttaggactatataataagcacttatcttagaagacttaggttaaaaaaagtttgcactaatatgtaaaaagtacagaaacatgttttctgataagatgtccaaaagactccatcagtattttaaatatgaaacgagtcttaaacagatcaagagctcaggatattgatcctttaaactttgtgtatcttttaggtgactccccctcatgcttacctcccttctctgcctctcttcttcctccttattcaagcctttaccctcttcttctgtcctccctttatccttctcattttgaaggtatcaagtgattgactcttcgagtggatattttacagcttagattgtgcttctgctgtctgatttaagtagtgttggaggcttagaaaacagctcatggctttgggctcaaagaccttcctatagtttctgctgtgctctgtataaatgcatgctttgcacgtgaccctacctgttctcataaagacagacaattagggtctgaaatgtgtgcacacttagctgcaaaatggtccagaaatgatgaaaaggtagcacaggcacatgcaatttgatttgtttcctattattcttagtacattagaaaaggaaatacaatttctcattgaatttgtttatattttgttagaaatgcaagtaagaaattaagatatattttcttagaagatgttaaagtattattctccaagctagatagtagaaagtcttaagaaatgtaattctaaaacacagcactaaaagtattttagacataatatagaaaagaatataggttatatcaaaataataatacatgtttctgttgaaaatgtgggatatgaaagacaatgcatggattttcattttaatgattataagttttaaatatggcgttaaccactgagttaagatcattatatgggtgaaaagtggtttctccccatgggacactactggtaggttggtgttttggctcttcatcagttttcagaatgattcttacagtgtaatttcaatgtaagggaacctgatgggccaaacagtgagcaaaactgccttaaaaagacttaattgtcaaaactaagactttgttttctgaagtgagaattatgatgttttaagatttcagtcgattttacctacgtggcaacgtgtagggagatgtaactttgggcattggcatttattgtcattcttgagtccaaggttggcaaacactttgagattctttctctgtgctctatcctgaaaggatttgatggaaagggttgcagaaagagagtaaaatgtctgctctgctcagcctctgaaagaagggccagggcagggctggttgtgggcaaattacttccacctccctttttgcccctgcttcagctccaggggagctgggagtgcacaggaggaatcagaagacctgggttccagtcccggctctgccacttactgcctgtgtgaccttgggtaagttacctgacatatctgagtctcaatttactacagaatgttgtgaggattaaataatatggtctacataaatgtgatttgtagcctcccaacatctgtagagacgatttttatcaccgtgggcttggcctcctccttgttcctctcaagtgttctgacgtcttgaagctgtccagatgactccactacttttgcttctcccttgccctctccacataggaaccattggtcctgccctctgcatgtttctcacagtgtaaaactacatggactaatcttcacactggactgcgggtagtcttatcccttctcaccctcctttcacctctctttaatctcagaatttgcatgcttatgagcatcaaagagtaagtctaatgcatgaagattcaggaagtgttgacaagaaggacgtaggtagagggaaggccttctagtcttgttcccacctcctttgttaacggttgactgggaaaactgagctcaaatgttcctccctctcatcttctatgtggaaataagttcctcagaggtctcactgaaaacctagatcgttaacctgaggagaattgtggagaagagataagagatttgatagctctggctttggtcagctcttttaggtgtccatggtacagcttcttctgttaggaaattgctgccttcccctcagccaccttagctgataatgctggcctctctgggtgttcagtcaggaaggatgcatgagacttcggactatgatatgctttctggatcacacttcagaccgagtgatccttatagggcttaaggaaagcatggagttctgcttggtccaacttctcctacagtccaagaatgcttggtctggcactgtaaataacagtagccatttacttgctgtttgcttgccattaatgcctgattgccataccattactagattgattttattaagaattctgctttttttttagccttgaaccattgagttatacttcatatggtttcttgctgaagtatcggtgccatcttttataacggaactgtggtgacaagtgcaggatgacacaataaacaccacagtttagacttaccagtcagtggaaaggtttaatggtacatccatgctgtcaaggacgcagggaaatctggaccttgatacagtgctgaaggcagggagaattgacaagggctttttgacaccccacctcccaccccaagatttcagagtattcaaatttacagccagtcattctgtagttgttaatgtctccaaggattcaataacaggattacagtaccatccttaaagcaagaagctgaaagcttcgtgagtgtctgaaaataaaaatgctgaaatattacctgacagaaatatcacaatgaagtattatgatatatgttagtgaataaaaacaatttctaggcctgaataaaaatataccagcatagttgttttaaagtaataaagttacacatagctgatatatatatatattcttataattttcctataactttccattgtacattcagttggaaaagtcaaaagcaagtaaactgaacaagaattgctttgtgacagttcatcctctttttctggtcttttcatacctgtctgaaaaacatttgatgtacaaacgagacagcctttctgtgtttattaagcataggctagcaatctgccactcatccagtttttagttgaggttcttactgggaactcatttgaaagtctctagggcattgaccatatgtggccagaggacatttagaaaatgcctctagaaatagtttttcagaatttgctagtaatattaatatgatcacaagaatattaacatctttcagtctcctgtttaagattttattttaggtgtaagggtactttgcctccatgtatggttgtgcacaatatgtgtgacgtgcctattgaagcagaagagggcatcaactcccctggaactggagttaacagatggctttgagccatcatgctatgtgagtgctgggaatcgagacctggagcataccagatatcaacccattcaataccaaatgnnnnnnnnnnnnnnnnnnnntagttgaggttcttactgggaactcatttgaaagtctttagggcattgaccatatgtggccagaggacatttagaaaatgcctctagaaatagtttttcagaatttgctagtaatattaatatgatcacaagaatattaacatctttcagtctcctgtttaagattttattttaggtgtaagggtactttgcctccatgtatggttgtgcacaatatgtgtgacgtgcctattgaagcagaagagggcatcaactcccctggaactggagttaacagatggctttgagccatcatgctatgtgagtgctgggaatcgagacctggagcataccagatatcaacccattcaataccaaatgctagatgtgtgtgttggggggggggtgatttaaattctgctgtttgctctatttattgttccttaggccgtggtagtggggtgtgtttgttgcgcgcgcgggggttgtatctcaggtaaaaagcaagaaagtgaggtaggaaatgacttttacaaacgactttttttacaaatgacttttacaaacgactgtgttgggtgtggtaatgcacgccaaagcccgtcactaagaaagctgggcaagaggatgacctgagctccagaatttgaggtcaagctaggtagcaggaaacccaactcaaaattaaatgcaataaaaaattaagaaaagcaaaacagaaaacctttaatctcatcaagtttaacctaacctgttgatttatgtatattattgactcgttcatgaagaaaaattttcctaacatggaacagtttaaagtgtaggaaaacaccatacacattcgtcatcatttctgtgttataatgataacatattatccatctgtagccatagaatttaagagtagaatacaaatagaaaactacaaaatcctattttgaacagatttttgtttaaatgatgagagaattagagttaatttatacatcaccttatagtaacttctgtgtgtcacaggaaagtagacccatcatggacaattgatctctaagtgctgccatgccaagagactggcatgctttctaagaacaacctagagtaacgtagcatcagatctcacccttccttatgctgtgagcctgtgcaagggtcttccagtccccaaagggaggtgaccaacaggtgagaagcactggcttataatctttcactaagaccaaagaacttagaaagacatcttgctttagagaccttgctatttgatgttttaacactcattaaaatagctactaaatatgggatttttaaaaaaaattataaaattgataaacctcccttacttaaaatgtgccgtagtggcagttcttgagtaaatttaggaacttgtgaatgaagtttattgtagagagatatttgtgttcatctaaacttcttagaccaagttcttactctgtttttgatattatgttggttattaatgtgggcaacttgtaaaaataattttgcgtgtttaaaggcaaattaagagctagtttgtcattagttaggtccatcccctctataagtcactaggataaaatagtagactagtttggctcaaactaataagagaaaaagcgagctgttctgtggtggcacacgcctttgatcccagcacttgggaggcagaggtaagtggatgtctgatccagatgaagccagcctggtctatagagcgagttccaggacagtcagggctagacagagaaaccctgtcttgaaggaaggaagggagggagggagggggaaagagagagagagagagagacagagacagagacagagacagagagacagagattcagaaactatatctcactttaaggaattagttctttacttatgttaattcatttagatgccacagctgctgtggataaggtgtttctttagggtaccttagtagagtgaagcagaatgtgctcagagtagatagccatgtggttgatttgtgttctatattaagaaatttagcttacaaatactgttgttttattaagtatacatatcaagttaaaacatgaggtctgtaattatctaaacctcattagtattgatacctgatggaagtagcctcatctaggccattcctcaaagccatcaacgagcagagcatgaagatcagtccaccacagcctgggcaacatatgtacnnnnnnnnnnnnnnnnnnnngacagagacagagagacagagattcagaaactatatctcactttaaggaattagttctttacttatgttaattcatttagatgccacagctgctgtggataaggtgtttctttagggtaccttagtagagtgaagcagaatgtgctcagagtagatagccatgtggttgatttgtgttctatattaagaaatttagcttacaaatactgttgttttattaagtatacatatcaagttaaaacatgaggtctgtaattatctaaacctcattagtattgatcctgatggaagtagcctcatctaggccattcctcaaagccatcgacgagcagagcatgaagatcagtccaccacagcctgggcaacatatgtacctctccagtctcagtcatgtgttctgaaatatccaagaaaaagagacgcactcctaggtcattgtgagcaaatggaaactgctcagtgaacatcactcagatctaaatgcctgcttgaggtctgtccctttaaggcttggcaaggaacagccatgccagtgttcatctcctgagtgaggtctgattctctgaactgcagcagcagcttccactagagctaggagctgcacacctgccctaaattacatctcttggaaggaaaccaaatgacttccttataccactctttccttgccctattaaacttttctattttagtgttactaataaaatggagatcttcgtggactcttaaaatgtgagtctaatataagtttcacaaatcttaaataaaattagtttttcttgaaccagatagtcctttgcattagtaattagtagaacctgagctacaaagtcctaaagttttttttttttcctttaaactgttttcctatacacctcagaaacctatagtttgttatagctttcataagtggatgccttctgctttggctcaagcaggatgctttcagccagtcatgcactgagttcccctgcctgttgacagtgactggattgttgtctctacctgggtttttgacaaattagtattgaaccatggacaagttttattaaaactgttgttgtttctttagtttagtttttaagactgacatgcccttctccgagataatgaaagtgggatttgaatcatggattttatactatgaaagtggtttgtaaagtaaggctctggtttcatgttgagtgtcattgttatcatttgccttgcaaattgccctgggatttagacaccatcaccattagctggctgttccctctaatccagttgatctatttgctatgtttttaataattctttctacttatttatttacttacttacttatttatttattttgaggcagagtcgcacattgcccagagtagcctgaaacttgctttgtagctgtggatgaccttgaattcttgaccctcctgactacttacttaatgataggattacaaacatgtatcacttcatctacctatttactgcctatttactttttaatacacacaacttatgttcatttgaggggattttatattacacagaggaaaaagacttttgtagatgaagtgaaaacaaacactggttgtggtctgctagtaatgttgattaatagcactaactgtgcttgcagaggacccacgttcaactcccagaactctctcataaccatctgtagctttggttccaggggatctgatgctgtctgtcctccgtggacactgcacatgtgtggtgcacatatacagacagacaacacacccatactaggatccctatgaagtcaatagcagtatccccacttcacacacacaaaatcgcaggcacaaattctgagcctttaacttacctaaatttcctcacactattaaggtgaaggactaatttagatttgacattttctgcaacaacagagcacagttcacctctggatgtgagtaaaggatgtgcactctcccagctggacgctaggttaactcattttcatcaatgtggtaagcttgtattttgataaatttgtctgacaaaatgtctttcaaccaatgttttcacaaagagtcaactgagttatcttattcctctagaagatcaaacacatgagtaaatctttaggttatttaagtacagaaatgaagatgagtgttggtagaagtatcagccagtatttctcaagggcaggcaagagttggaactatggggtagatagactgccaacctcttcctttctcatgctgcccattgctagaagaacaatctttgctcttcttttaatctttgctgtgatgtcttttcaatttctgaaggtattgtgagctagtccagctacatcaaggttcagtggtactgttcctgcctgcctagatgttggatagtagtgctctgatttccacccattctgcaaaaatggaggctgacacatctcccgaaggctatacaatctgttgtgcatagttattcacaatatactagtaagaagagtattgtgccaaagtgaggttattcctactgcataaacctcagctatatttaatctagagctttgtgcttaggtctggaaaagagtcctcaataagtatgcaaaaaattatgagttagccttgggagtccattgtaaggatttcactcagtgtcaagcacaatacgaataaactggttgagcagctgataaaagctgtaaagcaactgcttcatatatttgtcaaggagaggagagcactttcttcatgagaaatatttaatagtatattctagacaagtcatacttgaaatgatatcccaaagagcaagttatgtagaatagtcagtactaaaaatattcagtgatggagattctggaaataatgacattggacaagtgactcttactgaaagaatgaggaaaggtaaaatcattcatctagtctgatccatggagggggaagtagtcctgaccggaaaacccagtcagcagctgtaaaagtgctgccttcctttgtaggaaaggcagggttgccagtgcctaggcccagatctcagggaggtgccagctcaattcctgtgccatggggaaagctgtgcctctgtccacctctcattcctcaggctgcagccgaagtgactgagccagcctacacgagtggttttaaatgtatgtttccttgtttcactcaggagaaatgaccatggtttgtcacacacaagtttttgttgtgtgtatttcaccaagaatttggcttgatacttgaggttgtacgtgctttaagattacatttttattcatctaagttccttaattcttaataaaggagagaaaacatcaggggcttatatcacttctctgtcatatgatactgataattttatgaagcattttccgttaaatgtccctttcctccctcagactacagtacactttaagaagcagagatgtgtcctataatttatcaactaggcataaaatgttattcttgttgtttttctaattcagtttttaaaatctgtattcatgtccctgtagcataccatatgtatctgtttcagttggtcccttaaaggaatttttacaataaaaaccagtttggtgtttaagcagtaaaagcagtctggcaatttctgcttccacagaaagaattagttttattatcttaaattatgttatattatcctattattgtaaattgtaagaataatataaattatgagagtacaacaggagctggtcacctgtaattagtgttcattataaagtatataacgtaacatatttactgtggtatatagagaatgtaatgcatattctatttacttttcagcagagtatctcaatctatgtagttcagttgaaggaagcatgtatttgattaacagttactcagtttggtttaatgtcaaatgcatcgcctatttgttggcatctttattttctcatataattctcttatactcacaccattaccatttcctaccccaaaacgtgatgggcatggatagtgaagtcgtgtgccttggacatgatggactctgtgccaagatttagacctggttaaagagacagagctcttgagaatcctgctgccatacagaatctcttatagaaagctttccacatgctgatgtctttagagaaggtatacacttcctggtcagactcctggaaagtctgtagcctattaagcctgttggtttcaagagagatggttttctttctttttctaagggataatcctttagatttagctgtagtatttcatcaaaaatagtggccattaaatgacgattgtgctgatgctatcatacagtcatacagcatgggactcttgatgttatgctcagaactagagaaatgtttgcacggtaagagcgcctactgctcttgctctgcacacaaacactgtggttgattacaggctcagtagttaggatccgtcatccatgtggcagctcagcctcctgtacctccagctccagggggacccaggatccatccccaggttcataatccacacacaggcactcatgttgtaaaaaaatctttaaaaagtatgttacatgaagtgggagtttgtgatttcatccacacagaggatctaatacagtccaagttaattaaaagaacctgtgaataggacagtgattccaggatcaagggtcaggttaataaggagatgttcaaagagatcaaattgtcactgtgcagagcgaacgacagggccccgtggctgtgcgacttggtggtgatggttagcatgcatgtgctgtgctcctgcgcagtgctcactgaatggcttctcactgttttcacaagaaaagacaggaccgagcgacccagcaggagcatggcaaccatgaggtgatgggatgttcattggcttgtgaccatttcacagggtacatgtaggtgcttcatttcgttgtacactttaaatatgtataactcagttttcaaatattctcagtaaggctgaaaaatgttgatgttttaaaaatgaacctagaaaaattaaactactaacaaattaaaggaggatctaatacagtcaaagttaacgctatccgaagcaagacacattaataaagtgccgtgttgttcaaaataaagactttagtttgtataggtgagcagtcttgctgaaagatggccactaaatactggggaacaaattattcagagcatcactttcttctagaaaatgatgagatgaaataattcaaataactagtgtaaatactaagtaacataaaaaatgccacgatacagtactataaacatccaaccacatattttaatttcttttttttgttttgtttttttttttgttttttgtttttttttggggggggggggtttcgagacagggtttctctggatagccctggctgtcctggagctcactttgtagaccaggctggcctcaaactcagaaattcgcctgcctcccgagtgctgggattaaaggtgtgcgccaccactgcccggctacattttttatttcttaattttggagactttattataaaaaccttacaaataaacacatgccacacaccaaaggtaacatacccccaatctatttcaaattgtagatatgcataaaggtagtgttgtattgaagagggcccatgacgtttattatttacgtttcctactctttcttttcagaagctcctttttctggcttaagacacagtgcagccttttgacgttgtggtgaattttcctgggtgcttagactgctcaaagcagctggtttactttgcattaacgggaagaaaaccttagcggtgttagtccgcacagcgatgttaccggtgtttgttagtccgcacagcgatgttaccggtgtttgttagtccgcacagcgatgttaccggtgtttgttagtccgcacagcgatgttaccggtgtttgttagtccgcacagcgatgttaccggtgtttgttagtccgcacagcgatgttaccggtgtttgttagtccgcacagcgatgatggtgctactgtattggctttggctgtcactctgtgctacaatgttgtcctttatttggcagagtgtggagtagaaacctttagctgcgcatgtattcagatgactttgtgttgccctatagagtcctcaatctcgatatgattttaagtatcacttaatataattttaagaaatttaaatttgtttggcacttatttattcatatctatccatgcacttacatgctttggttagttaggaagagcttttgtgctccggctggcctcctccttgctccgtagctgagactggcctatcggccctgcttccttcggccttccattgccaggatgacggctgtcctccaccacacctttcatggggataaagtctttacaaagaaaaagtcagaatgatttgttcagtgaaacggtccacagtccttttgaaattctgtattttgtcagagtgaaagcagtgttattatgtatgtgttgtagatttagaaatagttgtttggtaattaggttttgaatttgttttttctttcttcagttctctccttctctttagccataaaatgttttactttaaataaaatattactagatatggtgcataaaaatggaagagggagataaatttcctagcccattttattttaaaatggtatttattttctgaaaaagtccttaatcctaagctaaatcattcttaggataacatttgctatacttgttttgtattgtaacagctatctcatatttttgagcctaaaaatttctctacttggctacacaaggtgagctctttttaacaaatgaggcgatttatagggcctagatttcctgcatgtgaacacttggagacagtgctgccgtccctgtccttcctagccacttcaccttgtactcggtagcatatggccaaagggaagctgagtcgagtttgtaatgtttgcgcctcccaggttccaaagcgtggccgccctgagaaagggaagggcaagggcactgctcacccatatgcacagcagccctgcttaccctgggcccgtctgtcttactctggtagtgccacaagatttcatttggaagaaaaggagcaccacacttagcctctaaattagcaacaatgcaagaccgacaaaactctgtcctttagagtcctgaagtgtgtgatgtctgtctcactgttgggaagcatatcagaggggaagccaggagcgtgaagggggcctgggccttcgttcaggttgtggaattaattacttacgttataaatagtaacgccttagtttgttattattcacaacaattttgccctctaagtttgaagttctaagatatcatgggcctcgctgttcagtgttagagctctcagtgctagagtagaccatgtctcaaaaaaggcaaatgctaaagactgtggcggtaggatgtaagtgtttaggacatagaggctgactgtgcacaaacctcacggaaataaaagctgagtcatccttcatttcagtttccacctgttctaatacagtacaatattaattgatcaatttatgaacagatcacttacagcatttctacttgtaagtttgcggcctattgcgtaatgttttgtaaaagcgtgtttgtctttacaaaggctgcttgcttaggctccgtcttaaatttggttatattcctataactatgatccgaccagacaggcaaagtatagcctagtggtttgtaaagtagatttttgcatatgaatcactacaagagacatatacgcattagcattatgtaaaatagcttacatttcaaggatcactaaatatattgaacttcatatgtagtctattaaatccattgtgaagcctccagtcagcacttccttggtttccccatgctctgtgattcaagtatgtagtgccctcagcagtgcaggcttactgtcaagcccctgtggggtgggctgggggcagtaaccgagatcactggcagcagcccacagtgtttggtggcctttggcatggctctggccaaggattcccgagaacccttgttcttgccactgagtgtttcgtttgctagctggtctcctctgggaccattattcccctattccaggacatcctcattccaattttttaaaaaaatgtatgtagatagatacattttaggaagcttctatagtagtaggtttccatattgtggcttctgaaaacagaagtcattagttttatttatccctaccaattttcttcttctaccctccctgccctcctccaccacagtttacccctttctgtgccataatttccttttaaccctttatactgctacatttttttctgccctctccatggacccttatttccctctgtggatattcctaatgaaatgcttaggtaaaaattcaaagctagcatccataaatgagagaacacatgaaatgtttgtctttctgggtctggattacctccctcaagatgattgctttaagctccatccatttacttttgaatttcatgatttcatttttcttaatagctgggtaatattcgactctttgaatatgtgatatcttgagtatccattccccagttgatggacatgtagactgtttcctagcggttgtgaacccagcagcagtgcacatgaaggagcaggtgtctctatagtaagggatagtcttttcggtgtattggcaagagtcgtgcatctggatcatgtggtagataagttttcagctcttttttggagacgcctcatactgattttgctagtggctgcaccaggttgtacttctcctagcagtgagtgagtgtgcgtccctacgcccatgccagcatttgctattatttgtttctctgggtcttagccattctgactgggctaagagaagcgtagttttaatatgcaagtccctgatggttgaggatgttgaacactttaaagatgtttctcagctgtttgtattgtatcccttgagagctctcttgaggtcgatgcatgcctcatttaaatttttttttgttgtgatatttaagttgagaaatcttttctattctagatcctaactctctatatagctagaaaaccctttctcattctgtggactgactgtccactcaagtgctggtgtcctttgctgtacagaaagaccaaacagctcctagaaagctgccatatccatcagcttctctcttacagaggacatgtcatataagcatgtttaaaacttctgcttgtgggtttcaagtgaccaatttatagtgaagtttcatagaacagttcacttacaggtggaacatatgtaactggatgtgtgttctccaaacacagtatgcagtgagaggccaaagacacagtatacagaagaaaagtacttataaattgtcaatttttttattgttaaaattattaatgtcatctgtcttggttattttgctttgcttcaaaatacatttgatatgtgcttgccagattggttcctgcaggtttgtgagtatgtgtgtgtttgtgtgtatgtgtgtgtgtatctggtttgtgtgtgtgtgtgcttataaaaggtttcagtgagctagttaatataagtgtgaaaaggggctcattttgaatttttgttctttgaaaccaggctttatttgataacatagctgaagtaagtgaaagttagaatcctaataactaatatgaagtctgaaaagcttaggtgaagatcacattggatgtttctatcacatgaagttattctaagccttataaagaaacttgctgagagtcagaaacaaaatattcccaccaggacttcttgtattgagttctgtaactttatctctcaaggttgacagatatgtccatccaatctaaaatctgggatggtactggctctaattcagtgtcaggttttgttgttgttgttgttgttgttgttaatatggtcataaactatgaaataatttttggaatctataatagagttttgaagcttaaaggaagaagataggctatggcaatggatagatttccttagagacaggtcaggcgcctcatttataactagaactatgctgtctgaggtaaggccaggatgcagtcaacactcactgttcctcctgcagactgtatggggtattgcatgtaaacaatgcttgccctcagctgcactgcaggagaatcttaaaagttaatgaaagcaaagactgcctttgacagtaattgaaaagtaagctatgagaatctcagtttttgactgctactttgtataaaaagcttgtgaagacatcaaattatgtgaaggaaatttcatggttggtcatgtctataacactaattggctctagtgagcacagtctgaatctcttaaggccagaagagacagcttttcaatagcaatatcatttttattaggcacttgctcagcacgtgcagtgtctaacatctaacgatgtgcttcattgtaaagcaaggacttttcagatgttctcagccagttctgcagctgagtgtagagaaaattaacattctattctgattcctgcgataattacttcctctcctaaagtaccagatatatcttcatccttttcagttaatatgcatagctctaagtgttgtcatttgtcataaaattaagtatatctccttttcaaatttgcaggaatatttgataatcatcattcagaacagtgaccagaataataaaatgatagctctctcctttcccaagaacgtttcaacttttctttctgcattttaattgctgtgctgagttccagatccaaactgtttgagattgacctctgaaaggggtttagggaaaggagagcctatccgacacttttctctaaaaagtggcaattgaattaacatcagatgaattgttagatttcactattctttgtggcatgacaggtccttgaagatgatcattaattttttggcgtagagctcatttcttctacatgcagatggagacacatttaaacagtagtgtttgaattcaaactaaatctattttagttgtcttctacagttcttggacttcagtgtccttcctaaaaataatgaatttgttgctttcttttgaatgctgtggaggatgcttcataaggagaaagatgttcatgcgtttatctgtgtactactaactgtcactgtgaggaagtagaatttcttcagtcagaatgtctatcatctccctgtttctggccggttgcagtacagtggtaggatacatgaaacttcaagaaacgtaactccgactttcttataacttcctatgttattattagagttaaaggaaagctgtgagaaaaaaaatagacttcaaaacatgaggaggaggcagaaagaatcaatttccaaaatcatgcaaattattgtactctgacaatttagtaggaatttaaattctactcagtaaaaatagatgctatttcttgcataaataaagctgagagcctgccccccccatttctgatagggtacctaattcatagctgaattaatttttagaaagcacacacagagagaaacagaagccagggcggcagcactcagtaagaaaccagtgtgctttttgacgatattttgttgcctgtaagaccttctccagtgttataatgaactctatacttcctctgctcgctctttaatcagagtctcctaatgtccctgtgttctttctggagctagtaggtccccctcacagtaaggaagagagcgggataaatgctttcctatgctttctcttgcatgaagctttttgtatatttaaattgcataaccccacctccattccaatttattattttctctgtccatagatgtaagtttcttaatgttggagatttcatcaaatgaggatagatagttggtgaatgtcctctggctcttcaatgacccttttggtatcttaggaagactcccttctttaataaaatgtattcagaagaaatactcaagaacattatatttgatcgtctctgttttcctcacttttcatcacttaatgtgatatttggaaatcatttcctttaagatctctgcctttaccccttacccttgcctctctctgttgacagcttatgaaggtatattaacatgaagattataaaccacttttaacttaggaaaggcagagctactttgaacatactgaatcattctttttgcaaataggaagaagaaggcacctatgatcacaccattgagttccgcagaggaggtgatggacagccacgaaggtctactcggccaacgcagcagttttaccaacctcctcgagctcggaactaatgtgaaaggtaaaattgacatttgccagatagttttcatataacgaaatatgtactttgtgttcaatacaagttcagctactgatgtttcatgatgcagatagaaaaggctgatcatgtgatgcagcttccagctgacagtatgatgtgcctctttcccaccagcttttgcccataaatccttctagaaatccattgctccactcctcctatatcagttactgttctgttgttgtaaagagatagaatgatcaaggcatggtataaaagaaacatttattgggaccttgcttacagttctcgaggcttagtgtgcgaccattatggcagggagtgtggcagtgtgcagtcatggcggtggagcaatagctggcagtccatatctgatgcataagatagtcagagaaagaaactggacctggacctcaaagcccatctcaaaggacacacctccttcaacaaggccgtgctcattccatcaaggccacaaccgcacaatcctttccaaacctatgagcctactagagacattctggtccaaaccgctacacttctctgttctccgccccattctctctccctatgtctctctatgtttctctcccatttatagtcttattacatttatttttattgtttttggggaatttcatacatgactactgnnnnnnnnnnnnnnnnnnnnaaatatagttttaaattccactcatttatattttgagtattttcctgaagtatgaatgacatagaattttagttatgtacttgccatgttatttcccaggaacattttttaaaactctttattacaacccttttgcctgcttctccaggatggagacacacctgagccacctgggtttcattgtaaggccagcaccagagactcatgagacacacagctctgagacagggcccagtgagagaagggagtcactggggtgacagaacagctccaagtgtgaggaaaggtgccgataaatcagacctgagattcgaggggattcagcccccaaagtccccaaattctaattcctggacactgtctgtagttgttgttttttttttttaatattctttttttaaaagatgtatttatttatttatttatttatttatttacttacttacttacttacttatttatttacttatttatttatatgtgtgtacactgtagctgtcttcagacactccacaagagggcatcagatttttgttacggatggttgtgagccaccgtgtggttgcttcgatttgaactcaggacttttggaagagcagtcggtgctcttaaccgctgaaccatctcaccagccccgactgtaattgttctatgcagtttagaaatgggagtggatatagaaagttgagtttatatacagctctttaggcagtaaaacgggctgatctttggacaataggaggagtttatactatgacttgagtgcaggggctatccaatccacaggaccagtctctgagcctattgtatggtggagtctgagaatgccgtggaggacgggtggagagggctgcacagttggccccagcaagtggctccagtaggctgtgaacccaaagtctgcgttagggatacttactgattcttgtgttacaaactggagttacaaatgtgatgtgcttggtatggtgaacttccgagtgagaataagatcactcctgaatttaagaaatagtgctgctggctgtcagcaggactagagagcctggttcatccactgcctacgttcaggttgcatgttgagctatggagagaaactgaggcagatgagccggacctccttcggtgttatgaagactagcaatgtgtactgtgagcacattctgaacacacacacacacacacacacacacacacacacacacatccaaagaaatgaaaatgaacttttaaaaaatagttatctaacaaggcagggaacaggtagagggagcgtgcaaatgacagaccaaagtaaatgataaatgacctaggtggactgcctcatgtcagacgtctcagacctaagaaagtattgaagaaggtaggatagggtgcagagcccaannnnnnnnnnnnnnnnnnnncacctatgatcacaccattgagtttcgcagaggaggtgatggacagccacgaaggtctactcggccaacgcagcagttttaccaacctcctcgagctcggaactaatgtgaaaggtaaaattgacatttgccagatagttttcatataaagaaatatgtactttgtgttcaatacaagttcagctactgatgtttcatgatgcagatagaaaaggctgatcatgtatgtgatgcagcttccagttgacagtatgatgtgcctctttcccaccagcttttgcccataaatccttctagaaatccattgctccactcctgctatatcagttactgttctgttgttgtaaagagatagaatgatcaaggcatggtataaaagaaacatttattgggaccttgcttacagttctcgaggcttagtgtgcgaccattatggcagggagtgtggcagtgtgcagtcatggcggtggagcaatagctggcagtccatatctgatgcataagatagtcagagaaagaaactggacctggacctcaaaggacacacctccttcaacaaggccgtgctcattccagcaaggccacaacctcacaatcctttccaaacctatgagcctactagagacattctggtccaaaccgctacacttctctgttctccgccccactctgtctccctatgtctctctatgtttctctcccatttatagtcttattacatttatttttattgtttttggggaatttcatacatgactactgtatttctatcctctttctaccccttcctctcctgactccgactccccctgtgtacttcttccccctcccatcccaccatgctccctctgtcccttctctgtcttctgggttttccagttaatccatttgaatactcgcatctgaggatacagagctagaatccacaaatacgcgagcatatgcctcatttctcagtgcgcctatactgtttgacccacttgagtgtatttaaggaagaggggatatttcagtgtaccatcaggagtcagaaagacaacatgactcttactctaatttgacttggaggctgtttgcttatctagatgcatttgtacccgtttcagaaggaacagctgtctgaaaatcatcttcactagggagagagagcagaaaagaaagtcaggagattagcaaagtcttggacatcatacacttgacaaagacctttttttcttaatatatttttgaagggaaatactttcacctttgggtaccagcctgccttgttactgttttcagcccattatgctggaactttgggagaatttaaagcgaatttcccattgggtttttattgtcctgcagactcttctggacttaactatattttcttcccagtgtcttcagtagcaagaatgacaattttctaggaactcttctcagttcctccttttacaattagttctgctaaggattttgtcaggatctatttttctcctgatcagtgaccagcaatggctgtggagtctctcaagtgcagagagcatgaattggggtatggtgtgagtggaaggaaaaaacattcagggagcgagggaaagaaaattatctcaataattttatgttgatgtaagttaaataatgctttaaatgtattgaaatgtccttaaacatataaattattcacatttcctggtaccaaatgaattcagtgttcctgagctatgtgtccttcagcttccccaaacttatgtttgaacctacttataatattgtaatataaacacagaacttttctaacatttaacttcatatctcagtctgccttaagccaaagcccagtgttaattgacttctgacccgtcagagccagccagcgtagggttttcccttttttcaccgcctcttcttagagctcagaacaaggctatcaagcaaagagtcctgacccacacacagatcaaagaagagttgctgcataactctaggcgtttttctgtagcacacaggaaccagttctcaggattttttttttcaaagcaaaatcaaagtatatacaaggatttaaggagcttaaacactgtagaagattgaatatatacccttaaaataagttccttgtgtttacaattaaatgacactttaaagtgaatggaaatagatatcctatttctcctttctggggatttttaaatcacttaaaacagtttttgatgaagctaaaggttctcagtggggtcagatttctggagctgctgttgggttggtgggaatgggttggatggagcgggctggaagtagagaaggcagggaaaggtaccatgcacccagtggggagggctcagccctcctagccttccagaagtttctttcatgtattttgtatgtttaggttccatggaaatttttctttgaaaaagagtatattgcttaaaaatacattatacaccatagcctgaggtaattgtggttaaccatatcaaatcatacagtgcaaacatttcctaatcaacttaagtatcccaggcttactttttatgccccctaagttaaaacttcatctcgaatgctggggtacagctctggtagggcttgcatacttagcatgtggtggcccctggattctatactcagcaacaaaataaaattagtaagtcagtctttctcatggtccagacgcttgcttggcttggattgttttcagggaagaaagttttgccataaagttcatgtaaacgtaaagagagaaagacatgaaatgttggctaggaaaaattttgtattataactcaaaaatacattcttaaagcctatgtaatataataaaatatttctgagaaatgatcttaaatgggaagttcagcagtaagatatgtatttcctgttcttgttacaaaattgaagacttattttttcttttcacttcccttaagtttctgttaatttatacatccaataagaggatgcatattggtagtcagcgatttaactttccataaatataaatatgaagttatatgtgctcaagtactatttttttctcaacaattacttagggatggtgagaaataatgtaggcatttctgttatcacttccaaaaatatagttttaaattccactcatttatattttgagtattttcctgaagtatgaatgacatagaattttagttatgtacttgcatggttatttnnnnnnnnnnnnnnnnnnnntttattgtcctgcagactcttctggacttaactatattttcttcccagtgtcttcagtagcaagaatgacaattttcttctcagttcctccttttacaattagttctgctaaggattttgtcaggatctatttttctcctgatcagtgaccagcaatggctgtggagtctctcaagtgcagagagcatgaattggggtatggtgtgagtggaaggaaaaaacattcagggagcgagggaaaggaaattatatcaataattttatgttgatgtaagttaaataatgctttaaatgtattgaaatgtccttaaacatataaattattcacatttcctggtaccgaatgaattcagtgttcctgagctatgtgtccttcagcttccccaaacttatgtttgaacctacttataatattctaatataaacacagaacttttctaacatttaacttcatatctcagtctgccttaagccaaaccccagtgttaattgacttctgacccgtcagagccagccagcgtagcgttttcccttttatcactgcctcttcttagagctcagaacaaggctatcaagcaaagagtcctgacccacacacagatcaaagaggagttgctgcataactctaggcgtttttctgtagcacacaggaaccagttctctggatttttttttcaaagcaaaatcaaagtatatacaaggatttaaggagcttaaacactgtagaagattgaatatatacccttaaaataagttccttgtgtttacaattaaatgacactttaaagtgaatggaaatagatatcctatttctcctttctggggatctttaaatcacttaaaccagtttttgatgaagctaaaggttctcagtgggtcagatctctggagctgctgttgggttggtgggaatgggttggatggagcgggctggaggtagaaaggcagggaaaggtaccatgcacccagtgggggagggctcagccctcctagccttccagaagtttctttcatgtattttgtatgtttaggttccatggaaatttttctttgaaaaagagtatactgcttaaaaatacattatacaccatagcctgaggtaattgtggttagccatatcaaatcatacagtgcaaacatttcctaatcaatttaagtataccaggcttactttttatgccccataagttaaaacttcatctcgaatgctggggtacagctctggtagggcttgcatacttagcatgtggtgggccctggattctgtactcagcaacaaaataaaattaataagtcagtctttctcatggtccagacgcttgcttggcttggattgttttcagggaagaaagttttgccataaagttcatgtaaacgtaaagagagcaagacatgaaatgttagctaggnnnnnnnnnnnnnnnnnnnntcccatcgggtaggtgagggctaccccaatgaagtgtgttcagaaaatgaagcttaggtcacacgtaccatgcattggacaatttgtcctcctgtaagcagaaattcccaccagtgttctaggtttgagtcccttagctttagaaggaggagccagtgggtgggtgggaggcagagcatatgcatctgaactgcagcctcctgacagaagaggaggcgtgttctggaggagctcgtaacagttactgagctacaaactcttcattcagtggacaggtttcttataccagcttgaagccagaagtgatcaattaagttgacgaatgagaagggagggaggcaaggatggggagaggaagagaagggaggaggagggaacgaaagtgaaggacttacattctcttagggcctactaagtctttattttcaacccacccttgctagtggatgtgactggcagtaccttttggcttttatttctgaatatcacagtggggtaggtctgagttcttattttctttttaaagatttccaaatgactctaatgtgtgtctacaggttgcctatagtagttctgaagagtttgaaaatctaataagagaaggggcagaaggacttaggaaaggagtctgagagcatttagagcaggcaagggttcttgggcttactctgtttcgacccctttctcctgagaacttaaacactggtatataatccagacattcactgacaaatattttataacagttctttgggatacatattcattttaccatttattaaaaataaaggtgagatgaattgataattaaagatatgatctttgctgagtatgtgactctgaaggatatagaggagctttggtatttaccagcttgatcagtattttgatttataagtgtcaatgctgcaaccgccactttgcataaatgtataatagagaatggcagtctgtttagggccatttcagaaatcaggggaaatactgccatgatcccacaccaaaactgatgtcatgattttaaaaataagtctaaaaattaaagtattatatatgtaataatatacactatgtcaatacaacatggggtaagtgctgcctagtatgccctcagatccattggagtgtggtttgagtttgaactgatgttaggccagtgagcattcagaaacctactgtcnnnnnnnnnnnnnnnnnnnntctttctcatggtccagacgcttgcttggcttggattgttttcagggaagaaagttttgccataaagttcatgtaaacgtaaagagagaaagacatgaaatgttagctaggaaaaattttgtattataactcaaaaatacattcttaaagcctatgtaatataataaaatatttctgagaaatgatcttaaatgggaagttcagcagtaagatatgtatttcctgttcttgttacaaaattgaagacttattttttcttttcacttcccttaagtttctgttaatttatacatccaataagaggatgcaaattggtagtgagctatttaactttccataaatataaatatgaagttatatgtgctcaagtactattttttctcaacaattacttaggatggtgagaaataatgtaggcatttctgttatcacttccaaaaatatagttttaaattctactcatttatattttgagtattttcctgaagtatgaatgacaaagaattttagttatgtacttgcatgatatttcccaggaacattttttaaaactcattatacaacccttttgcctgcttctccaggatggagacacacctgagccacctgggtttcattgtaaggccagcaccagagactcatgagacacacagctctgagacagggcccagtgagagactcgtgagacacacagctctgagacagggcccagtgagagaagggagtcactggggtgacagaacagctccaagtgtgaggaaaggtgccgataagtcagacctgagattcgaggggattcagcccccaaagtccccaaattctagttcctggacactgtctgtaattgttgttgttgtttttttaatattctttttttaaaagatgtatttatttatttatttacttatttacttatttatttatatgtgtgtacactatagctgtcttcagacactccacaagagggcatcagatttttgttacggatggttgtgagccaccatgtggttgcttcgatttgaactcaggacttttgaaaaagcagttggtgctcttaaccgctgagccatctcaccagccccgactgtaattgttctatgcagtttagaaatgggagtggattaaaatttgagtttatatacagctctttaggcagtaaaacgggctgatctttggacaataggaggagtttatactatgacttgagtgcaggggctatccaatccacaggaccagtctctgagcctattgtatggtggagtctgagaatgccgtggagaggaggctgcacagtaggccccagcaagtggctccagtaggctatgaactcaaagtctgcgttagggatacttactgattcttgtgttacaaattgtattacaaatgtgatgtgcttagtatggtgaacttccgagtgagaataagatcactccagaatttaagaaatgctgctgctggctgtcagcaggactagagagcctggttcatccactgcctacgttcaggttgcatgttgagctatggagagaaactgaggcagatgagccggacctccttggtattatgaagactagcaatgtgtactgtgagcacattctgaactttggtcctaggttcttgtttaatggaagaatagtcttcacagtttattaaccttgaaatgaatagttctctgtagattctgtgactgtttcgtcttgaaggtccaacttttaacaccatttttagctagtaaaaggtatatgttaaaatgtagattatttttggacaactttgtgcagcattgtctttgcagaattttttatgtcaagaattagaaaaataatctttacaagcagagctgttagcctgggatgccaataggactggcattatataagagtgtcagtgtccaaagctcaagcaggcagaatggttcagtgggtaagcgcatgtcacgcaaatctgaccacgtgggtctctgtttctgagtttctggaacatacacaaacacataaagaaaagaaaaacatactccgccaacttgtctcctgagatccacatgtatgccatggtgcacacaggctaccccccccctccatcatgcacatacataataatgtaattaaagaaaagcaagaaccggagggatctattttctggtcaggagtctgcttactttgaaggacttgggagccagatgtttccagtggtagatgacctattcctgcccaagcactgtttcattcatgatgctcacccaacaaatctctcattctctagcccagctcttgtgttatcatcactgatttttgtggtttcaaatactgtggtacccggggctggagagatggctcagcagttaggagcacttgctgctcttacaggggattgagttcagttcccatcatcactattgggaggttcacagctcctgtgtctgcagctttagaggagctaacaccctattgtatcccctgaggacacctgcatgtgcgtgtgcgagcacacacacacacacaaacacacacacactcatccaaagaaatgaaaatgaacttttaaaaaatacagttatctaacaaggcagagaacaggtagagggagggtgcaaatgacagaccaaagtaaatgataaatgacctaggtggactgcctcatgtcagacgtctcagacctaagaaagtattgaagaaggtaggatagggtgcagagcccaactggccgactgcttctcatttatgtcttcctttgtgaaggagctgttcatttaattcataagttcctgcagtcagtacctaataagaaaggagctagcaactccacagatacacacttccaaaagaaaaagaattctgaatgtttttgaatttggggttttgttttgcgttttcaacagggcttttctaagtagtcatggctgtcttagaactcactctgtagaccaggctggctttgaattcaaagatctgcctgccttgaagtgctagaactaaagggatgtgctaccacagcccagnnnnnnnnnnnnnnnnnnnntctgtagattctgtgactgtttcgtcttgaaggtccaacttttaacaccatttttagctagtaaaaggtatatgttaaaatgtagattatttttggacaactttgtgcagcattgtctttgcagaattttttatgtcaagaattaggaaaataatctttacaagcagagctgttagcctgggatgccaataggactggcattatataagagtgtcagtgtccaaagctcaagcaggcagaatggttcagtgggtaagcgcatgtcacgcaaatctgaccacgtgggtctctgtttctgagtttctggaacatacacaaacacataaagaaaagaaaaacatactccgccaacttgtctcctgagatccacatgtatgccatggtgcacacatgctaccccaccctccatcatgcacatacataattatgtgattaaagaaaagcaagaaccggagggatctattttctggtcaggagtctgcttactttgaaaaacttgggagccagatgtttccagtggtagatgacctattcctgcccaagcactgtttcattcatgatgctcacccaacaaatctctcattctttagcccagctcttgtgttatcatcactgatttttgtggtttcaaatactgtggtacccggggctggagagatggctcagcagttaggagcacttgctgctcttataggggattgagttcagttcccatcatcactattgggaggttcacagctcctgtgtctgcagctttagaggagctaacaccctattgtatcccctgaggacacctgcatgtgcgtgtgcgagcacacacacacacacacacacacaaacacacacacactcatccaaagaaatgaaaatgaacttttaaaaaatacagttatctaacaaggcagggaacaggtagagggagggtgcaaatgacagaccaaagtaaatgataaatgacctaggtggactgcctcatgtcagacgtctcagacctaagaaagtattgaagaaggtaggatagggtgcagagcccaactggccgactgcttctcatttatgtcttcctttgtgaaggagctgttcatttaattcataagttcctgcagtcagtacctaataagaaaggagctagcaactccacagatacacacttccaaaagaaaaagaattctgaatgtttttgaatttggggttttgttttgcgttttcaacagggcttttctaagtagtcatggctgtcttggaactcactctgtagaccaggctggctttgaattcaaagatctgcctgcctttgaagtgctagaactaaagggatgtgtgctaccacagcccagcctaaattttgatgttacaatgttgctttttatagagatttaagtttatgaatgagattgttttttctaactcatgctgtttgagattactgatatttatatgaacatttgatatttttaaaaaggtttcagcagagttctgctttttataaagtatagaagaggtcatctgaggtttaattttgttttcttccttttgaaacagggcttttgtgaaggaagagccactgactgaaacatcctggaagcccactgatagattttccacttcttcagagagagactcaatatgctggatatgatttttggagaaagaaaaaaaaggcagatattagggaaacgattcaatttacacaaggcaatggggggaaatactgagttcgatagagcaaaatatctttacaagtggaaaacttcttctgccatcaataaaagcattgcattgttatataagttgc

SEQ ID NO: 480 - DNA, 2522 bp, Mus musculus
ggccgctcacaaaacgcggcgagcggaacccgcacgcggaagcgcccgtctcactgagcatgcccagtggcacagtcgaacagaggagttttttttttttctttttcttttctttcttctttttttccccctctttcttctttttctttttttctgggtcttccagtaggaggcccgtcccccaccctcagttcagacccccgccgttccccgagcctgagcagctaaggtacctttcagatgaaggcgttgaagcttgcacaagctctcctgggaaaggcagcataaatgacatcatcctgattgctctcaatacagatttgagaacaattggcaagaagttccttcccagtgacatcaacggtggaaaggtagagaagagcctgaacacaccacctggcacaaaagtgaagctctctggcactgtggacataaagaacggattcctgctcttaagtgactctaacaccacagttcttggtggtgaagtggaacacctaattgacaagtgggctttacagagaagcttattaaagcataacagaagcaatattggagctgaaggtggcccacctccttttctaccttttgggcagaagtgtgcatctaacgtccaagtggatagcagagagcttgatcgaagaaagacattacaagtttccctgcctgccaagcctgcaaatgataatgatgaatttgaaaagcaaagaactgctgccattgcagaggttgcaaagagcaaagagaccaagacatttggaggaggtggaggtggtgccagaagtaatctcaatattggtgctgctggtcaccgaaatagggaggttttacagaaggaaaaggcttccaagtcagagagcaagaacgaaggtgtctatagagaattggttgatgagaaagccctgaaacacataacagaaatgggcttcagtaaggaggcctcaaggcaagcgctgatggataatgccaacaacttagaagcagcactgaatgtccttctgaacagcagtaaacagaagcctgctgtgggccctcctgctagaggaagagggaaaggcaggggtcgaggacgatcagaagacgaggaagacctgggaaccgcaagaccatcagcaccaagcacgttatttgatttcttggagtctaaaatgggaactctgaatgtggaagaacctaagtcacagccacagcaccttcatcaaggacagcacagaggatggaatgccgagcaaaatgggatgaaggacggcactcagtcaagacatcttcctcgaaacgataccaggcagccaagaaatgagaggccacctcgctttcaaaaagacaccccaacttccaagtcaactgtagaaaacagcgtattatctagaaatagaggctccgaaaggccgagtagttcctcaggttctgatgtgtgggcagaagagaggatcaggtgtgacaggccatattctaggtatgacagaactaaagacgcttcacatcctctaggctttcagcacaacgatggtgcttttaaaaagagagagaactctatgcaaaacagaccaggaagaggccctttgtatgcagaggccaaagaaaacccacttcctccagaattcgtagattacaataatcaaagacgtgggagaagagaaaaccaaacaggtcatcctgatcactgttatgagaggaaaccacggacaatgaatagtgaagctgttagtggtctaaaaattgagaaacattttagtgtaaacactgattacccgaggcctgtgcagagcaatagtcttggtgttccaaatggagagacagctccgcctctgaaaggaaggcgcgtaggaccgattaagtcagcaggacctgtcacagctgtgccctacgatgataaaatattttataatagtgggcccaaaagaaggtctgggccaattaagcctgaaaaggtgatagaatcatctattcctgtggagtatgcaaaagtgtggaaacctggcgatgaatgttttgcactttattgggaagacaacaagttttaccgagcagaagttgaagccttgcattcttcgggtatgacagcggtcgttaagttcacggactacggcaactatgaagaggtgctactgagcaatatcaagcctgttcagacagaggcatgggaagaagaaggcacctatgatcacaccattgagttccgcagaggaggtgatggacagccacgaaggtctactcggccaacgcagcagttttaccaacctcctcgagctcggaactaatgtgaaagggcttttgtgaaggaagagccactgactgaaacatcctggaagcccactgatagattttccacttcttcagagagagactcaatatgctggatatgatttttggagaaagaaaaaaaaggcagatattagggaaacgattcaatttacacaaggcaatggggggaaatactgagttcgatagagcaaaatatctttacaagtggaaaacttcttctgccatcaataaaagcattgcattgttatataagttgc

SEQ ID NO: 481 - protein, 744 aa, Mus musculus
PLTKRGERNPHAEAPVSLSMPSGTVEQRSFFFFFFFSFFFFSPSFFFFFFSGSSSRRPVPHPQFRPPPFPEPEQLRYLSDEGVEACTSSPGKGSINDIILIALNTDLRTIGKKFLPSDINGGKVEKSLNTPPGTKVKLSGTVDIKNGFLLLSDSNTTVLGGEVEHLIDKWALQRSLLKHNRSNIGAEGGPPPFLPFGQKCNVQVDSRELDRRKTLQVSLPAKPANDNDEFEKQRTAAIAEVAKSKETKTFGGGGGGARSNLNIGAAGHRNREVLQKEKASKSESKNEGVYRELVDEKALKHITEMGFSKEASRQALMDNANNLEAALNVLLNSSKQKPAVGPPRRGKGRGRGRSEDEEDLGTARPSAPSTLFDFLESKMGTLNVEEPKSQPQHLHQGQHRGWNAEQNGMKDGTQSRHLPRNDTRQPRNERPPRFQKDTPTSKSTVENSVLSRNRGSPSSSSGSDVWAEERIRCDRPYSRYDRTKDASHPLGFQHNDGAFKKRENSMQNRPGRGPLYAEAKENPLPPEFVDYNNQRRGRRENQTGHPDHCYERKPRTMNSEAVSGLKIEKHFSVNTDYPRPVQSNSLGVPNGETAPPLKGRRVGPIKSAGPVTAVPYDDKIFYNSGPKRRSGPIKPEKVIESSIPVEYAKVWKPGDECFALYWEDNKFYRAEVEALHSSGMTAVVKFTDYGNYEEVLLSNIKPVQTEAWEEEGTYDHTIEFRRGGDGQPRRSWTQQFYQPPRARN

SEQ ID NO: 482 - DNA, 177393 bp, Homo sapiens
cgccccagccctctacagcgcgggcgaagggcatcggcggggaagcggctgtggttgccagatctggcagtacagagccaaggtggcagggccgcgctaggacacggatggtcccagggggagggcaacaggaaaaacaagcactgacacaactgccccatttccccatgtcccctaaaagcaggttttcttgggctgaccagggcattttcactgtggtgtccgactggggcaactcgatctgcccgcggggactcaaaaaagcttgagctgcattttttctttgcgtccgggcggaccaaaaggcgaggtgaagggaacgagtgtttataagaaagtaaacttttgtgcagaatgggctggggacacctctgagttttgctgcccgcaacgtgacctttttagcgcggtcctggacgcgttccctcgcagccaacccgtcagtctcctcaggccttatcctgccctctctgaggtggccgcctgtgggcgctgcaaacgccacacttttgctctacgaagaacctcctcgcgactttccaaggtgtgcaactcagaaaagcgccccccaaaacaagtaaaagccttcggggaagaggcaaagtccctgaaccgtcctgactccagccaccagccggtgtttggtggatcaggtcccggagctccgcagcctgggagccccacaccaggccggcccctacggccgctcagaaaacgcggcgagcggaacccgcacgcggaagcgccggccgcactgagcatgcccagttgcagagccgaccagaggagttttttcttttcttttctttttttttttttaagggggggggtctcaagtaggaggcctccccatcacccccaccccagccccccaccacccccggcctaagcagctaccatggcccaggtggccggcgcggcgttgtcccaggcgggttggtaagtggcgagtcccgccggctgccgggccgcgggtgcgggccggggccccagggaggttgggttgggggcggcggggtgcgtgtcggggtaggcggaggctgtcgtccgcccccggcctctccccgcgttcgggccggctccgccccccggcgccacgcggagccctgcgagttcccctaggtcccctggaggcggcggcggcggcggcctgggccccgggcggcgggcctgggccccgggcggcgggcggcgggcctggggaggaggccgggggccgcgagccgggcgggtggcggcccagaccccggccgaccggagcgccggggaggacctgcagcgccgtccgcgcggcttctccggggagggggtgtttctgcagcgggatcgggaggcgagggctgggaacgaagtgcggcggagagggacgaacgcggccggagcccgcgggcccataggaagttgagggcagagcagagcacagcccgcgctgcggccggagccgcctcttcttaccccttatttcaaagtacagtgtggaccagtgtgaatctgccttccgcggcacacacacaacttctggagctaagaatgaccgcaatgtcaactcgtgggggtgctcggtagaacttttcttgaaaggatggtgttctgattttaagaggcctttcgtgtcaagattttcaggatttgaaaacaatacaaaattatgcgaaattaggcagtttctggaattgcggccattacggttgtaatcatcccgtttaattcagtaacgcttttcccaggcttgcacaggcacattctgggatgaagggtaggaacggggatgaaaaagatttgcaacggctctctgcaattactgctttaggagaaagagtgaggcattaaaagaccaaacaaaaccagggggaatagtgataaaccgtacgtacagaggaacagatgagtgcactgtggaatgggagggagagttactttcctaaagtggacttggaaagatggtaaggaaaaggctttctagcacagagctgctggagatgacacagggaagcgcttattgttttgcagaacctacacaagatctatatggttcgtgaaagatgtggatttgattttgtgaataaagtttttgatcagtagagggatataatcacaactgtgctttgaagaagcccctcctgattttaaaggcacttgtgttattatacaccccattttacaggtgaggagactgaggcaaagagctgttaagtaactttcccaaaatgacatagctagaaagtggtggagttgaatgttgagcacagagggcctggctctgggcctggttcctttaacgcttatgcgttattgttgttacagttttttcgcagaacagcatgggcgtaaaagattgtagagttaaaaacactgtcttcagttttgtttctgttcaataggaatctcttctttcagtttttttacccacaagggtgtcctgaataatcttggatccctctttcatttgcctttctccccatttctcattaggttgagcgttgatccttcacactagtaatattttcatttacaaactcagtattttactgctttccaacatgaccccccctcctttggaaagattagtctcattttttaggtcccgaacacgtgttgactttgttttctctggcctcttatgcttttccagggcagggaagtgagtcttatttttctccttatctggattgtcaagaaatgcaccagattgtaggttctctgtaaagtctaatacagttgaccttggaatgcccctgccagtcagaattctctgggcagggcctctgcagaagcttaggtagagtcccaccctgcttcgttatattgttataaatcttcagcaatgttatattgtagcatttgctactttatattgcaacttaactgtttatgtttctcccacctgtctgtgctgcttctgtatggcagtgactcataaaggcagtagtaatctgcggggctaaaaacactatctttctaggaattgtgagtttcatgtaattcctgctaggtctcgaacagactaggcatgaggatctcctaggctttcaggtggcttctactaggtctttaattggggacttactatgttaaaatttagaatcacaaaggtttaaaggcagaaaagagcactggagggaaaatttctgactgaagggctttcaccaactcattttagttcttatatcctgagtttgctcttacacttggggttctctgttaactgtcactgacaaaccatttttcttagtattcaaatctatgtacttagttacttgtagaagctaaaaagaagtagatgctaaaacatggacacactattgttaaatctgttctataggcttcacctaaaatagcagattagggaaatatttagtgctgaaaagtttacaattctgaaaatgtgatcttcaggggggtacagaagatctatgtagaccaatctgttcaagtttacattatttttaagcgcagtttttttccttcttaaggttttaatcttcattagaacccctataaaaatcagtattttaaaatataacttcaaaagtagctacctggcggacttaaaataatttttgttcttcaatggccagtagcacacaaactattagattttgctgatttgaacttgaatgttccagggctttctacagagtagtgataatgtttaaataatgcactaaatggtaccttgtaaagcttaattatatgcatggaataacttcacggggagaagaaatttgactctgaatttatctagataacaattttactcactctgcatttttgttttctctcttcagaggttcattctcctttaggatgatatccctgatcactgtgagtggaaatataaaattctactcacaggagaaagattcaaaatgttgatctctggacattttgaatttttctcttccatctcctcctttgtttgtttgtttttaacagaaacctgtcacggggtacctaatcagttgtgtttttgtttttgaaaatgtatcttctggctgggcgcagtggtggctcatgcctgtaatcccagcactttgggaggctaaggcgggtggtcaggagttggagaccagcctggcaaaaatggtgaaaccccgtctctactaaaaatacaaaaaaattagccaggcgtggtggcaggcccctgtaatcccagctacctggtgaggctgaggcaggagaatcgcttgaacccaggaggcggaggttgcagtgagtcgagattgcaccattgcactccatcctgggcgacagagcgagactgtgtctcaaaaaaaaaaaaaaaagtgtcttccatggaattaatgttgcatagcttaactctctctctgtgcatatgaagaaactgaagcacagagagtttcaataatttgctcagagttataaatggcagaaccaagaatagagcccagatgtctagaataaagattcagtactcatttccaccaaaaattaacagaagtgaccgcatctaatttaaattattgatcaaaagtgacacatttaaaaattgaaaattgggttgaagcattttgtggtgtgtaaatttactttcctagtccaggaaagataaagggcttattctgaggggtgatcctattagaatcaaataaatctttgccttgcagtgaatcaactaattgtgtactaggcttatctgaaaatctggtaaattctgtattttttgaggtttaagaatacagttggccctccatatctgtgggttctgcacccttggattcaaccagtcacagatctaaaatatttggaaaaataaaaaaaaataaaaataacaatacaacaacaaaaataatatgaataaaaaataaaatataattttacatagcatttacactgtattaggtattttaagtagtctagagatgatttcaggtatgcaggaggatgtgtgtaggttatatgcaaatactacactacactattttgtgtcagggacttgagcatcagtagactttgttatctgtaggggccctgggaccaatcccttatggatactgagggatgactgtatctgaaaaagtgggacactgtattgtgtgtctttgcttcttttacccagtagtttgagttgaagaccctttaaggtagcatatgaaatagcatttccattttgttctgaaagaacatgtagtcttaggaagcccagttttctaacacccaggtgttagccatggagtactccaggttttgttttgtttgtttgttttgagggcagagatgggatggagaggataaacaaaggtctccttcttacctcttgaatttcactttcccctttggggttatctccatttgattattggtgctatcaccatgctaacatcctctggcccaagtgcatacataactcctttcccttcatttcacctttgaacaactaagaaagcctacagcttattaaggtctttgtcaaaatgtagaactggaaaacaaccatgggataaatagaaaaaaataagaagcataatgacagtataggttataaagtgattattgcactcttgtattcaagggcccactctattccacattactttgaagatagctactacaaagatgtggaacaacttcaggatattttgctggaatttctaattcctagtttttgacctgtccacagatgaagggcttcttttcacattccattacatagaggcttcttctcaaacacattaatgatcatgactaagaaattcagatacccagcctgcagccactgctgtgcctttgtttgtttggttctagttttcttagagacacaccttttttccaggagattgctggtgaatgatctcactcttcagatgagaaacattgtgtagcagcatcagtacaacctctgcagtagcagtaatgtaattataccttcttatactagtggtaatagacataaaatatgagtttatgcatataataagagggtattagaagttttgctccctcaccattccagtacatctcttagaaataggtaaatatttgtagagaatattggtagttctttataaggtttaatattaagtgcagggtttttaaaatctagaattatgatatacctttaattaccatgcttcatggcctttaaagtaagtcacatgtacaagacaggcagatataaatagcttggtatactcttttggaaaggattcgaatcattaaaacacttttttagatgctgaagaacattagaggaaaccaattgcttttttttttttttttttttttgagacggagtttcactcttgttgcccaggctagagtgcaatggcgcgatcttggttcgtcgcaacctccacctcccaggttctcctgcctcagcctcccaagtaggtaggattacaggcatgcgccaccacgcctggctagccaattgctttttaatcagattttagtggagcttattggagacatccttctattttgaaatattttctatttctttaatgaacatttgtaactatctctttggcttatattgtttgtgaaatgaaaatgttcaaaggtaataagccttgccgactttctgtctcaaaatatgttacatattgctttacagcttctgctgatactgtaaactgcgaaaaatgactggatgttttgttaaactgtgcaagtgttcaggtttcaaggtgctgtttgcagtgattttttttttttttctggtgactaacctataaatctagtttcaactgcctgtagacttgactgccttaagcataaagggggtataaaaagaaacttgctacctcagcaggttgaaaataattttctcctttcatacagcagcatttgctaaatcaactaaaattgcatagtaacattttaagaaccataaaaatatgactatatcaacttttttggcttatgttttctccttttgacaaaagaatattggcattttgacttatcatgtttcagttaagtgccatcagtctagaaattcattctttctgaaaggtctaggatatagaagtagccgaagaacagtattgccagataaattttggaagaagaatactgaatgcccagaaattttcatgtaaaaatttgagaaacacttgtgaagtcatagcacagcaaagaaaagcaaacaagatggggcaaaaatgtatggtaataatgtaaagtattaagaagggtgtgaaatcaaagacactgatagcagaaaagaaacaggttggtgatggacaaaaggaggaaagaactgcatagacagagagcctatatgtaccatagcactggaactccaataggattcacatctctattggatggatgtgagtgtgtgtatgtacttttcacatgtagtacaattttatggccttaaaagtagagacaaatagcagtatagtgctcttgaattataatatctttacaataataagtaaggcatatacagagaaatatgtaactctatacaataatatgtgcactgaaatacatttagtaaatatttatacctcctgtacacaaagcactgtgttgctgagctatgatgtacaagacaggcagaatttaaacatgatatacactgttattttacttgcaagattttgttgaaacacatctgagagcagttaacccagacttgggaaggttggaagcctttccagtactgatgatgtataagcaaggtttttgtatatgtcttctttaaatatcatgtcttgtgctctttggctaaggaaaaaacaaggcactgtatatgttttctttaaatattgtgtcttctgatatttggctaaggaaaaaacaaggcacattcatcaatgcactcattcaacaaataattcgtttttgttgttgttgttggtttgtttgctttttttttttttttttgagacggagtctcgctctgtcacccaggctggagtgcagtggcgggatctcggctcactgcaagctccgcctcccgggttcacgccattctcctgcctcagcctcccaagtagctgggactacaggcgcccgccactacgcccggctaattttttgtatttttagtagagacggggtttcaccgttttagccgggatggtctcgatctcctgacctcgtgatccgcccgcctcggcctcccaaagtgctgggattacaggcgtgagccaccgcgcccggccctgtttgctttttgagacagagtctcactctgttgcccaggctggagtgcagtggcatgatcttggctcactgtaacctccacctcccaggttcaagagattcttctgcctcagcctcctgagtagctgggattacaggtgcccaccaccacacccagctaatttttgtattcttagttgatatggtttggttctgcgtcctcacccagatctcatcttgtagctcccataatccccacatgttgtgggaaggacctggtgggagatgattgaattatggggatgggtctttcccatgctgttctcgtgatagtgaatgggtctcacaagatctgatggttttaaaaatgggaggtgccctgcacaagctctctttttgcctgctgccattcacataagatgtggcttgtccctctttgccatctgccatgattgtgaggcctccccagccatgtggaactgttaagtccaataaatgtctttcttttgtaaattgcccggtctcaggtatgtctttatcagcagcatgaaaaaggactattagagacagggtttcaccatgttggccaggctggtcttgaactcctgacctcaagtgatctacctgtcccggcctcccagagtcctgggattacagatgtgagccacagtgtccagcctcaacaaataattcttaaacaccatattgtggcaggcactttcttagtatagtcagatatagtcttatagaaaaaaaacccattaattacatattcaaacatactgcatctataaagaatactagagaggagaagagacatcattccaaatgcatgtactaagggggaattagccttttcatggtggtcagagaatagcagaattactaaaggggagttcgtgttttcatggtggtcagagaatgctatcctgagatctggagaatgagtggtaactgactaagtgaggggagcacagcatctgcaaaagtcatagggcactagggagcatggtgaatacaaacatctgaaggacctgggtggctagagggcaagacagagggacagtgtagtgagatggaattaggagctacctagggacaggtcacatagcttggaccttgttggccatgttaggatttatttttattttgaaggcaataggaatcagttgaatagttttaatcatgatgtgagggttatggtgggaataacatcatggttttgaagtatccttggactgaagaaaatggagctgggcaggactatgaaatagatggtgatggttgagatagagagcagcagatcgacttgacagatatttggaaggtaaatggacaggactttttgacagattggacatgaatgtgacacaggagttgttaaaggcttgatttctaggttttggacttgtatcctcaaatcaattacaattcagttagggactgttagaagacggtcgcatttttgggggttgggtcatgagttaagttggtcattacttgagtgtgaggtccctttaagtcatctaaaataagatgttaggcattaggaaataccaatcttgcactcagaagagaagactgggctagagataaatttggagtcattccagtataggtggtgattgaaatggtgcatggataagatcatctaaggctgcagctgtccggtatggtggacattagacaaatatggctactgatcacttgaaatatgtctagtctaaattcagatgtgctataaatgtaaaatacgcactgaatttggaagacagtactaaaaatgagtgtaaggatctcagtaatttttatattgatcatactttaaaatatattttgttaaaataattattaaattaatttcacctgtttttactttttaaaatatggctacaagacaatttaaaattacatatgtggacattatatttgttggacagtactgatgtaagaaccaagctttgagtaagaggctaggttcaagtactgagaaattttagcatttttagaggagaattagcctttaaggacctgctagttaggggaaaaagctttagaatgcattataaagtcattgagttttctaagaacagaaaatggacatatcttttggagttctttgataagactatttgatatggtcactgttagtttattgacttgctgatattggagactcagagcaccttttaaaacactctttataaatttagatatctgaaagtcttttaaaaaattccccacaatctttccccaaattcctctaaatatataaaatacaaataaaatttagctgcagcttttcagaaggcagtctgtcatggatattacatgaagatgttaagaaaacaaaattttattttattaaatttctaagtgggaccatgaagagtttaaaaattaataaaggtggattttgtaaaatacctaatgtgaaataataaatgtaagtattgatggaaaaacttgctaaataaattaagccagtattttataatgaatttggaattgactcagttcaagctttgttttgagagagaaatagggacatatgttaagtttaggtgtccataacattgatagtttgattgatgccttatgactttgtaagcttctgtaagggaaagatcaagtcttcatatttttgtagtattccaagcatttagcacgatgtaaggtgcacagtagacacttaaatacttgtggaatgaatgttactctcatcttagttggtcttggtatcattcatcattttgcttttgtgtcctcaagggacatgaaacttcttcaagctttttgtagagtagaaaattgttatttctgaaatgaatgttgtgaaatttaaacaaaatgttatgaaaaatgtgatctcctcagaaatgcaggaaatagcctgttatagaaagctttctctatttgttgatattttctaccttgtttatagaattcaactgttaagagatataactagtgataatgaagataatacacttaaaggtatatgtttgtatttagttagaagaaaagtttgaaatatgttgataacatttctttgcccgagacaaccagctgtctctttagggtctttgaaatgttctgtttcaaggtaatattagtagaaactgttttcagaactatttctttcacatttgatgttttatgagatagcaacaaattcttttctttttgatatttcagaattgcttacagcttagcacttcagtgatatggtgtggctgtgttccgacccaaatctcaacttgaattgtttctcccagaattcccatgtgttgtgggagggacccagcgggaggtaattgaatcatgggggtcggtctttcccatgctattcttgtgatagtgaatacgtctcgtgagatctgatgggtttttcaggggtttccgcttttgtttcttcctcattttctcttgccgccgccatgtaagaagtgcctttcacgtcccgccatgattctgaggcctccccacccgtgtggaactgtaagcccaaataagtctcaggaggtctgatgggtttatcaggggtttccacttttgtttcttcctcattttctcttgccaatgccatgtaaaaagtgcctttcacctcccgccatgattctgaggcctccccagccatgtggaactgtaagtccaattaaacctctttttcttcccagtcccaggtatgtctttatcagcagcatgaaaaagaactaatatagtaaattagtaccagtagagtggggcattgctgaaaagatacccaaaaatgtggaagcagctttagaactgggtaacaggcagaggttggaacagtttggagggcttagaagaagacaggaaaatgtgggaaagtttggaacttcctagagacttgttgaatagctttgcccaaaatgctgatagtgatatggacaataagatccaggctgaggtggtctcaggtggagatgaggaacttgttgggaactgggtgactcttgttatgttttagcaaggagactggcaacattttgcccctgccctagagatttgtggaactttgcacttgagagagatgatttaaggtatctagcagaagaaatttctaagcagcatagcattcaaaaggtgacttgggtgctgttaaaagcattctgttttaaaagggaaacagagcacaaaagtttggaaaatttgcagcatgactaagtgatagaaaagaaaaacccattttctagggagaaattcaagccagctccagaaatttgtgtaagtagcaaggatcctaatgttaaaccccaagaccatggagaaaatgtctctccaggccatgtcagagatcttcacagtagcccctctcatcacaggcctggaggtccaggaggaaaaagtggcttcgtgggctgggcccagggtccctgtgctgtgtgcagcctagggacttggtgccctgtgtcccagccactccagccttggctgaaaggggccaacatatagcttgggctgtggcttcagagggtggaagccacaagccttggcagcttccatgtggtgttgagcctgtgggggcacaaagtcaagaattcaggtttgagaatctctacctagatttcagaggatgtatggaaatgcctggatgcccaggcaaaagtttgctgctgggatagagccctcatggagaacctctgttagtgtagtgcagaagggaaatgtggggttggagcccccacacagagtccctactggggcactgcctagtagagctgtgagaagaaggccactgtcctccagacttcagaatggtagagccactgacagcttgcactgtgcacctggaaaagctgcagacattcaacaccagcctgtgaaagcagctgggaggaaggctgtatcctgtaaagccacaagggcagagctgtccaagaccatggaaacccacctcttgcatcagtgtgacctggatgtgagacctggagtcaaaagagatgattttggagctttaaaatttgactgtcccactagatttcagacttgcctgggccctgtaacccctttgttttggccaacctcacccatttggaacagctgtatttacccaatacctgtaccctcattgtctctaggaagtaactagcttgcttttgattgtacaggctcataggtggaagggacttgccttgtctcagatgagactttggactgtggactttgggttaatactgaaatgagttaagactttggtggactgttcggaaggcatgattggttttgaaatgtgagggcatgagatttggaggggccagggttggaatgatgtggtttggctgtgtctccaccaaaacctctacttgaattgtatctcccagaattcccacgtgttgtgggagggacccagggggaggtaattgaatcatgggggccagtctttcctgtgctagtctcatgatagtgaataagtctcacaagatctgatgggtttatcaagggtttctgcttttgcttcgtcctcatttttctcttgccatcgccatgaaagaagtgcctttcacctcccaccatgattctgaggcctccccagccatgtggaactgtaagtcctgttaaacctctttttcttcctagtcttgggtatgcctttatcagtagcatgaaaatggtctagtatattcagttagaaaggagttaagatgatgaaattatatttcatgctagggcctttaatgaggcaaagaagtaggaatctaggtatcttgcagtctaagttgtcatagagttcaagtccactggggttttacctgaggactctgctaaacagagtttactcttgttatcttgcaattatgagcaccaaaaaggacgtgtatgtgttactgttaggacataaagcatgtaaaatgggctcctcagtatccttgctcagttcactgtactcagaatggcaagtactggcaaccctttgtgtctgtgctgagagtgcaagttgatattcaggggcctctactcctaggaattggccacgatcttttctctaggctgcctgctgattcccttagtatgttctaatttgagtaataatgagatttctcaggatcgttttgatttgacttctttcctcagttttgcttcttggggatggatagggtagggttagttctcaggctacatgagaatcttctttggttgctacattttgaagttgtgcaagagctggatgtacgttttcccttattttggttgttgctgataaattttttgactgccttttctggttgtggattttttgctttggttttatgttttttccctgtttaattactcattcatcaaaagtctttataaacatattaattagatgtttccctagtaaagttgatacataatgaaagtttgtatatgcgtatattaaaaacataatggctgtacagtaccatgaaatttcagtgaccatttttgtgcctgtgtttacattgttgttagtgcaaaatggccacccaaaatatttaactttgttaataaacatatctagctgctctttgcaacacagacacctgccatagtactcattaaattttctactagttataaagacttagttagctatgatagttcacaattaaaagacactctcatataattagatgtagtttcttaacaaattgagagtttaacaagttgaattaaaaattcatgaagaaaagagtgcagtgtagtggtatatacttttacagttacagggtaatgagaatggacttaatacttaaataatacatgacagaaattatggtgtgcctactgaagtttgattatcttgaaagttcaacagagccttgacatttttactagtttctacttatgtgaataagcatttattttgatattattttaagcaaaatgcaaaagcagattaaatacgaaactggcctgagctacatttttccaatgcttaaaaaaaatgccctgccttaattaggttgaaggctaggctgatgtaagagaagcctggagaacataggttttttttggtttttctttttttttggtcacaaaacaacccaaaatagttagacagttctgctttgtgctgtcatttaaggacccaggttcctttcatcttattgctttgatgtcccctcaccccttgctactccaagtgtggtccacaggccagcagcattgatatcacctggtagcttgttagaagtgtagaatctcaaacctcaccagcatcttaattttagtaagattcttattaaagaatcttattgcacattaaagtgattcttttgcacattaaggtttgaggagcagcactttagggtattgtcattgtcttcatggtcatagcagagtagctgacaaatttgggtttccctagctggaatgggaagaacagcagagagccatagagtcagttccctgaggaagagagacatcgtatccttggtttctaagaactttaatctgacatctacctgaaagggattctgagaactgtggcctagctcagtgactctcaaacaaacaactagttaaatcttataaactgtaaaaccttgtggtagtgtgagattgctccaaaagtttctgtacatatccaatcatgtgacagtaacagagtttgtggattggcattaatccatgaaccacacttgaagtaggtcatatttgacatatttgaatttttcattcagtgatattgttcagcttacggtaaatttgagtgaattggtgtgagtaaatgaggctctatttttttggcctttgatactttttgatttagtttacttaatattcttctactttttaaaaaatagtgatatcacttatttttagtgataatcttacgtttgtaaggacttttcagcttgaaaagcccttttccctacattatatggcattctataatagtaggtagtatggactgtatttgcttataaaaagggattacaagccttgttggtttaatcatgctgataactagtatgacacatcaagaaatggatgcttttttaatgaaatgatgccttctttttatgtattttgtaactttcttatacttttagttattaattagtatttgttttgaattggtgttatgaaacttatctgggccattatattggccaactgcttgattttttttgttattattcttgccttgacatgttttcatggaaaataaaattgaattggactgttagtggtcttttaaaatggtttaccttatcgcagtagctttcatttcatgtgtaaattaaattgcttatcattattcttaaacatttgcttaaagtaatgctttaagcaaaagtatatgtaaaatatgattatagatctctacatatctaagatgcgtactttaaaagttgaaatacaggctcatgtttgactgaatgtttttgttattttcaacttgctttttgctgttacggcctgcctggtattccctgcagtatccctgtactcccaattttttttttttttgcctaagtacccaatatatatgaactaataggtcaacaggaagttagcatgtgaaaatgctgccaaggaatgggcccaaaagcttgaatcactttgtgtttgaaactgagatgtgtaaattaaatgattttgaataaacatttatattagaattagttaattataattaattagaatttcatcacaaaactgaattattgtgagagattactgaggaaaaaaatagttacaaaaacactgccatgtaccttttatattcagttagatatatatctgcttgagaagctgtatggctggtgtttacgagcatgggctcttgaagaccaattctcctgagctgagatcagtcctggttctgccacagattagctataaccttgggcacatttcttaactgctcatgtctcagtttgcttatctataaaatggtgtcaatattatacctacttcatagtattgttaggaggattaataagttaatacacacaaagtgcttagaatactgcttggcatatgctgaatgcccagtaaatacttaatgttcttgctgttgtatgtcaagactggactcacttaaattagtgttgtcagttaaatacattcatgttacttgcacacatgaatttctgatcttgtgtcacctttggaaaaagttgatgccctttactctattttagattaccttatatagcctgtgagagtgttacttcaataaagataaaatctttatatcttatggatttttaatctcaaatatatatatcataccattagcattttataatcttataaatattagtgtctcaaattaaagataaaaggtacaggtagaatatttcacataatattacattatttcacttgtacaggaagaatagaaatttgagagaggaaactgtcaatattcagtctcttaatatggacatgaacttaagtctcagctgaagggaggtattttcatattcttgttgaaatgttgcattgttattaagtatttgccttatatttttataaataaggatttcacttaaagaataatgtgttgccctcctcaaaaattaaatgtgtggaaccagttgtgcaatatgtaaatttgtgagacaatgtacgtttttttttaagtccagatacattttttttgagagaaggacatgtctattacatctagtttttgaagaaagaaagattatatagctttatcctaaggagttggcagactatgaccagtgggccaaatctggcctgctaccagtttttgtgaataacattttagtagaacacagccagaaccactcatacacctactgtctgtagctgcttttgtgctacaggagcaaagagtagttgtgacagaaatcaaatattgtaggaaagcctgcaatatttactatctggttctttacaggaaaagttagccaatctctgccctaagtaattagtaaaatagatatattaattctttattacttagaaaaaactgaagttggaacaagtagtatatgctattggtaccagaatttgtcaaaaataacttgccaagaaaaccacaatccttgttcttatccttatttgtagtgactagtatgaatagggctgcctcataaattagtaaatcctaactatttgataggaatgtgtcagtacttgcagtgggggctttttgtcaaatacagagttatcaggtgttttgaaatggtctactaattttaatagaactttccattatatcctagggcagatagaaatccttcattggtttcaattgagcattcctatcacacttggacaacttttggattctgtagaatacctagacaacagacagtggttttttttttctgtttttgtttttaaaaaataaaatcagtactgcttaaacagagggaaaagggtgaatatgaggttgaaaaacctgttaaaacacatcagtcttgagtaaaatataggaggagtttgttcttagatatcaaaatatatttggtagccaatcatatttaaattaaactgattggtcatcagcatactgattattttatataagaaattgaacttatgaaaaaaaaattcatgtgttgatttgaccaagattgatgttttataacagtgtttagggaactaggcatgaagggcctaatgagatcctgttttacaatattcattgccattctcattcatatttttcctttttagatttgtgttctgaaactttgagaattaccaattccactctgtggacattcatatcaaccgggatccagtgcacaattttcatttttgatgttattctgattatattattattttattatcagattatattattctgattacattactatttcatcagaatctttacgcttcagccaaccacttgggtgtatcaggactataattaacatattggtaataagcaaacatactcatttaacaaatgtaagcaataataggcaaatgccattattgggaaaactaggccctcaatgttagctaactaaacagaccaatgcaatctttataactcattcacacacttaaagaatatgagaattttgaagagtacattaatttttctgtaaaacatgattaatatcaaattgtaagatgtatgcaaataaaattgctttcttttctcaaatgggcaagctttgtacagatgccttgatggatcttccgggaactaccatgtccagagatttattgagttttaaataagagccatgaaaagatcagatttgccaagtttacaaagatagttctggcctttatttcaaggataggtgaagagatcaaggctcaagcaaagacaatttacggaaaaacattctttagagacaaacttcatcaatatatctttttcttaaggaaaagtgaagaaagggagaactctggttggccgtcagtgtccttgacttgtctccttcccctatttaaaaatagaatcagttaataatgtttattagtgttaatgttggacattttaaaataccctttgcttaagaattaataactttgttggatggctcaaaaattgtgttttggaagttgataaggtattgattttagatttaacatggtacaatatcaaatcatggcaaaaatgatccactttatgatttcactgactcttttcaataattaaggtttctctaagtgtaaagtgtaaagatttttagaggaagatgtggaagtactcataatatagttcttagtctaaatttctaatgagattttttttttaactaaggaagttttaagaacagatttacaaaacagtgattattgaaagatggtgatacttgctcttacctttcccatgatcagttgagctgatatggtcaactactaattccattcttagtgctatttccaaagcagtatgtgaatgaagctgtatttaaaacattcatttaccaagtagatatttattaagcaagacttttttctccaaaatctgagtttccttttttaagaaaatattttacgaatgccttttcttgttgttgtaatgtttagcacatgtatgactgtgttcatgtgcacatttgtttgcattagtcttacttatagctactgtttctttgggctgtctgctacagtctggcttgtgcttcttccacactgctgaaatgcttttgctaaagtaccagtgaccttccagttgtgagatatctttcaaatttttccttactggctctgttactttggacggtttatgtctatcttggaattcactgttaagacatagtgtcttaaaattcactattccttgtctcccctaacactgttctcctcatcttgttcttgttctcttcattcctttctcatcattcgttgtctttttatgatattcttatcatacctttccctggcttttcttagtttccttattggtactaacaaagttctatctttggtccactttcttgttcttctgactttaactgatcagtctctctctctctttttttttttttttgagtccaggtcttattctgctgcccaggctggagtacagtggcataatcatagctcactgcagcctcaatctccttgggtcaagtgataaacccacctcagcctcccaagtagctaggactacaggcacacaccaccccacatggccaattttttattttagtagagatgggctcttgctatgttgtccaggctggtctgaaactcctggcctcaaagggcttctcctgcctcagcctcccaaagtgctcggattacaggtgtgagccattgtacttgacccagtctcatttgctttcatgatttaaactaatttcatttttttttttttttttgagatggagtctcactctgttgcccaggctggaggctatcccagctcactgcaacctttgcctcctggattcaagtgattctcttgcctcagcctcctgagtagctgggattacaggctcctgccaccatgcccagctaatttttgtatgtttagtagagatggagtttcaccatgttggccaggctaatcttgaactcctgacttcaggtgatccacctgcctcggcctcccaaagtgttgggattacaggtgtgagccgccacactggccgatttaaactaatttctatatactgatgattcctaaatctttctgggcctgaacttcaaaatacagccttatatatgaaatactctgcacaattcgaactaggtatcccaggggcacctcgaactcctcatgcctttcactgtacttctcttcccctccatctcccaagttcttcttctctttacactcttgttttagaggtggtacactcatctcaccattcatgagtcatttttttctttttcctattcactcatatctaaattaagaatcagacctgccaattttaccttctaaatatttttctacttcaggcctttattcttgagagtagcctcctgattggtcttcttgcttactgtctcaaatctgtcttttctataggtgttagaatgagttatctataaaggttgtctaatctttagatcttttgtcacctacaggatgaagtctgtcttacaaaggtatgcatagcctcttgtttctttgtggcatccatttttgctcctacctctccagcagtttatgctctaacaagaccaacttgcttgtgggtctcttatgtacatggtattttatgtcctgccactgtaccatttctgatcttgtcctttctgcttggatttttttctccatttaagttagttaattattgtccatcattttaaaacataactgtcatctgttataagaagtcttccctgatagaaagtaggtacccttcttctgaggtcctttaacattctgtctctagctcattgtgctataattgtttatatgtttgtctcctcaagtaaaccaagcttcactgggactaaacttatttgaggtcagtaccatggttttttcatctttgaattcttgggactagtacagtgtctgccacagagtagatagagactcaacaaatgtttattgaataaataaactgaatggacttgtctttttaaattgcagcacaattaatgtacattaaaatgcacagctcttaagtgtttagcatgataggttttgatagttgtgtacgtttaagtaacccccattctaaatgttatatagaatgttttcatcacccaagaaagttttctcctgctctgttccttctgtgcccacagatagtctttttctgacatctggcatcatgaattcactatcttgtaattggatattataaaaatggaaaccttatttcttctgacatcttagaagtataatgcttttgagattcattcatattcttgtctgtattggtagttcattttttattgttgagtagtagttcctgtttgagtataccataatttgtttggtcattctccttttgatagacaataaccagtttttggttattatgaataaggcttggagcattcatttataagtattttttgtggacatatgttttcatttctcttagaggatatctaggagtgaaattgctgggccatagggcacatttttgtttaactttataggaaacagccaaacgtttatttccaaagtgggtgtgacattttatactccaaccaacagtgtatgagagatctggtttctccacttcctcaccaatattctattttcagtccttttgattttagccgttcatctggtgtgaaatggtatctcattgtggttttaatgtgtattttcttgatggctaaagatgttgagtactttttaatgtgactattagctcttcataaagtatctatttgagtcttttgtccgttaagaatttggattgttgtacctatcactgatagcctaaagaaaatatggaacatatacaccatggaatactatgcagccataaaaaagaatgagttcatgtcctttgcagggacatggatgcagctggaaaccatcattctcagcaaactaacataggaacagaaaaaccaaacaccatgtgttctcactcataggtgggagttgaacagtgagaacacatggacacagagaggggaacatcacacactgaggcctgttgtgggggcggggggcaaagggagggagaacattaggacaaatacctaatgcatgtggggcttaaaacctagatgatgggttgatagatgcagcaaaccaccatggcacatgtatacctatgtaacaaacctgcacattctgcacatgtatcccagaacttaaagtaaaataaaaaaaaaagaatagatggatgaaagcagaaaggaagaaaaggaataatctaaagtaaatatggtaaaatgctaatattttaaaaatctaggtggtgtgagcaggaatttttaaaaattatttttaatgtttttcctataagtaaaaatatttcatattagaagacaaaaagagatgaaaaggtattttcatctctcttataattattgtggttatgtgttttatatgtaatacatcatgtaatgatagatatactagattattaatattacaaatatagacttagaagatagatatcatttacatcaagttaatcagtgtataagaagtatgattttttctacttgtaattatttccataaaggttaatgttttttacctaacaacaacaacaacaaaaagaaattggattgttggacttcttaatgttgatttgtaggagttgattatatgttctagatatgagtcttaaaatacatatgctatgaatgttttttacaatctgtggcctttttactttattaatgatattttttgatgactaaatatttttaattttggtcaagatcaattttatcagttttttttttcttttataatgagggctttttatgtcctgttcaagaattgttgcctacttcaagtttgtgaaggtactttcttatgcttgcttccagaagctgtatgatatgggttttatatttaagtatatgatcaaattatgttggtttgtggagtgggaaagaagcatggtattatttttatttttatacagatattcaggtatttcagtgacatttgtaaaaaaaaattttctttattggattgacttggcattttgattgaaaatctgttgaccaggctgggcgtggtggctgatgcctgtaatcccagtgctttgggaggccgaggcgggtggatcatgaggtcaggagatcaagaccatcctggctaacatggtgaaaccccgtctctactaaaaatacaaaaaaaattagccgggcgtgatggcgggcgcctgtagtcccagctactcgggaggctgaggcaggaaaatggcatgaacccaggaggcggagcttgcagtgagccgagatcacgtcactgtgctccaacctaggtgacagactgagactccgtctcaaaaaaaaagaaaatctgttgaccgtattttgtgggtctatattgttttattattctatttgactgtcctcatgccaatatcacactgtctggattaatgaagctttatgataagtactgataacaattagtgtgagccctcatcttttctttcaggttaatttgggaattcttgagcatttgcgtttccatattgtattagttcattttcatactgctgtgaagaaatacccgagactgggtaattaataaaaaaaaagaggtttaatggactcacagttccatatggctcaggaggccccacaatcttggcagaagacgaaggaggagcaaaggcacatcctacatggtggcaggcagcagagcatgtgcacaggaactgccctttataaaacaatcggatctcatgaggcttacttactatcacgagaatagcataggaaaaacttgccttcttgattcaattacttcccactgggtccctcctgtgacacatggggattatgggagctacaattcgagatgagatttgggtggggacacagccaaaccatatcacatacgaattttaacatcagtttgtctatttgctgaagaaaatcctactaggacttatgataactagaaaatggtggcagtgtagtaaataacttcccaaaatctttcccccaaactatacggatgacttcacacctaagcaaaatctgtgtaaaacaatgctctcaaccttatgtgagcacagagaatgtggaaactatcaaagacctgtgagtaaaaagaaaaagttaaaagccagccccatggttccacacactcctgtgccaatcttgtcccacttgtggggctttggtgatccaaggcagacctcgaaaaaaactacagaaaagcagaggagagatgcaaatgaaatgactggagggtggtaggaatgaccaccagaaagatcaaatccaccctaaatgtgaaaaataaagaaatttggcttattaggaagatatttcaaagtaaggacaggtgccaagtaaagggccagaaagaaacagatgaaaaacagtgggtcaggcatgtaacttaaaatagacacatgccatataaaggaattggtgtgtgaattaaagggatagattctatttaaatgggtaagtctgatttcaaagaataggtacgatttaaagggttcaatttttgaaatgcatagcttctgggggagaaagaaacaaaaaggagggaaggcgtttcctttggcaattggataatgaagaggaaaagaaggaaaagggaaaaattaaggccctgtgagacaaaatagaactacacaggtggaggattcataatatgccccctaatgaaaccaaccacttcattaaagtatatagcatggattgactggtaggaaagggtgacattggactagaaatattgtaaaacagcccaatgtcacaaaaatgaacaaaatatttctaaatcaggaaacaaatttgcacgcaaacctaggaaaattctttttccccaaaacaaccgtgaactataactctaagttcatactccaacagaattaaatttactccaacgagcatttggaagtatgaaaaatcacttgagtcagaaattaaaaaactaaagacagaagtggacaataaacagggacaaatgggggaaaatgttgatggagctttggaaagaaatggaagaaaatatcagaattattttagaaataaagaatatattacaagatacccaagggaaaatggactagaatgaaaaattgataaggagcattgaagaaagaaaaacaactatgagaatttaaataagaaatgtcagagagaaagtagtcgaatattattcctttggaataatattcaagtcaaggaaggaataatatttgttttatttgagtccctaaggggaaaaaaccaaaacaattgaaaagagctgatatctaaaactataattcaagaaaactttccagatggaaaaagatgtaaatccacacattgaaagtatgtcaagtgcaatgaaagattaatccacagcaattaactccaagacatatcccagttaaaaattatcagattattaagataataaaatccttaggaccgacatgaaacaagtcaaataaaagcaaaagaattatagtagcatcaagcttttcaaaaccaatatataaagcaaggcagaaatagagcagcattcaaagaaaagtcagtggaagtatgaatttgggattttatatctagccaagctgctttttaaatattaaggccatataaaaatagttttcatcataccagaacttttatgcatcaagagatagagcaactggctttctgaaacagaaacttcaggagtttgcagggacacatacatagaaacataccagtaacaggatacttcgttatactgctttcattactagtaatgatagatttaagtggacaaaatataaggaggtagaagatgtaaacaatatagccaataaggttgatcttctgggtatactgtatattgaatgctatacctcgataagagaaaatactcattttcttaagtgcctatggcacattcacaaaaactgattatatattatgtcataaggaaaacattaataacttccataaagtagaactattataaacactctgattacagtggactaaaactaggatttactaacaaaaccaaatacaagccctttcacctagaaattaaaaagtttgactaaacaactttttaaaaagtattttaaaaaattgtaaaaggagaaatacaattaagtgtatttaattgtaaaaaaatgtaatgacagtgacactttatatcataatttatgtggtatatttaaagcagtgattagaggaaaatttattttactgcttttattaataaaatgaataaatgaactaaattttcagcgaaactaaaaaagatcaaggtaagtcaaaagaaaggaagaaaaataataactataaaagcagaaattgatgagcaaaagaatagaaaaacagtaaatctagcaaataagccaaaatcctgatgttttctctccctggccatgcagtggttttttttgtttgtttgtttttgttttttgagatggagtcttactctgtcgcccaggctggagtgcagtggcgccatcttggctcactgcaagctccgcctcccgggttcacgccattctcctgtcttagcctcccgagtagctgggactacaggcgcccgccaccatgcccggctaattttttgtatttttggtggagacggggtttcactgtgttagccaggatggtctggatctcctgacctcgtgatccacccacctcggcctcccaaagcgctggaattacaggcgtgagccaccgcccccagacagtggtttttaaaaaacaactttattgagttataaatcacagaaaaaaattcacctctttaaagtgtacagttctggctgggcgcagtggctcacgcgtgtaatcccagcactttgggaggctgaggttggcggatcacttgagggaggagttcgagaccagcctggccaacatggcaaaaccccttctctactaaaaatacaaaaattatctgggcatagtgggatgctcctgtagtcccagctactccgaaggctgaggcaggagaattgcttgaacccaggaggcagaggttgcagtgagcagagattgtgccactgtaccccagcctgcgcaacagaaggcaactctgtctgaaaaaataaataaaaataaagcatatcattcagtagcttttcgtatattcacagagatttgtaatcatcactactatctaattcaagaacatttaacccgatatgcattggcatcattcccctttcctcctagaccctggcaacttctcatctgctttctgtctctatggatttttttatatgacgtttcatataagtggaatcatacagattgtggcttttaatgtttggcctctttcatttagcataacatttttatggttcattcatgttgctgcatgtatcattccttcacttatttttatgacaataatattacaatgtgtggaaataacacattttgtttatattcatttatcggatgaacagtcttggtgtttttgaaaaagttaacaaaatagacaaaccattagctaacttattcaaggaaaaaatgcataactatgtaaaataagaaataacaaagagaagtcatctttgaaacagaatacattaaaaataatttgattaaaaaatgggcaaacgatctgaataaacttttccccaaagaagacataaaaatgtctaagaggtgtatgaaaaggtgctcaagatcacgaatgatcagggacatgcaaattgaaaccactatgatgtatcacctcacacctataaggatggctattatcaaaaaagatacaagataacaaatgttggcaggggtgtggagaaacaccctagtacaccgttgatgggaatgtagatgggtacagcccttgtggaaaacagtatggaaactcctaaagaaattaaaaatagaactacagtatgacctagcaatccctattctgagtatatatccaaagaagatgaaatcactacctcataaagatatttgcacttccaagtttattgcagcagtagtcacagtagccaagctatggaaacaatctaatgtccatcgatggaaaaatgaataaagaaaatgtggtatatacagttgatcttgaacagtacggatttgaactgtgtgagttcacttatacgtggattttctttgatttctaccatgccaccactgagacagcaagaccaacccctcctcttcttcctcctcctcagcctactcaacatgaagacaatgaggatgaagaccttaatgatggtctctttccacataatgaacagtaaatatgttttccatatggtttttgtaacattttctttttattgtaggaatatagtacattatacatatacaaaatatgtattaattgactatgttattggtaaggcttctggtcagcagtgggctattagtagttaagtttttagggagtcagaatttatactcagattttcaactgtgcaggggttggtgctgctaacacccgagttcaagggtgacttgtatttacaatgggatataattgagcctttaaaaagaaggagatcctgccgtttctcacccatgaatggacctataggatgttatgctaagtgaaaaaagccagacacagaaagaaaagtattatgtgatcttacttatatgtgcaatattataaaccaaaaaagagctcaaatatagaaatagagaatgaaacagtggttaccacaggcagtggggagggcagaggaaatggggagatgtgggtccaaggacaaaaaatagatctgtaggatgaacaagttgagagatgtacaacatgaggactaaagttattaaaattagagatttttattaaataagtagatattagctgcccttgtcacacacaaaaagtaactgtgagatgatagatatgttaataagcttcactatggtaactattttactatctatatgtatcctgtaacatcatgttgtaaaccttgaatatacacaataaaaatttttttaaatgtcatgagacactttgcaaataattctaaaaacctatatgaaatgggtagttttctaggaaagtacagatgaccaaagttgcccccattagagttagaaagcttaagcagaccaatgttatagaagaaatagagaaaattaaggagagattactccataaaagcaccaagggacaaatggtttcacagaggaattctataaaaccttcacataccatatactgtcattcatcactttatggggtatgttctagaaatgtgttctcaagcaactttgtcactgtgggaacgtcacagagtgttcttacacaaaccttaatggtattgccgactacgcgcataggctatatggcatagcctgttgctcctaggctaccaacctgtacagcatgttatcgtactgaatactgtgggcaattgtaacacaatttagtattgtgtacgtatttatgtatttaaacatatttgtatattaaaaaatatgtaaacatagaaaagatacagtaaaaatacagtattttaatcttagaggaccacagtcgtatatgtatctgtcattgaccaaaatgttatgtggagtgtgactgtattgaaaacttttttttcttaagagcaaatagctgtaatatccactttaaatctttattattttcagcatcaggttcatcttggcatcagacagatttgattgattttgttttttcttcagaatgtgttccattttttcgttctttgtatgttgggtaattttggattttgtagtgcatattaatagtgttaaattgtaaagatttttgttctgttttacactgatgaatattgtttcctgtgttattaaaggtactttttttttgtggggaggctgggtttgaactgcagtttcgtttcttatgcagcagctccatcctcttttcaaatcttttgtcttcagctgggatgtttggagtcggcttcgcacgtgtcatttggaggtcagtcaggtgtaggtagacagagtttggtgatcccctctctacgtctttcctttgactgatctctccacactgttcagtgctcctggtttacccactatccttttctgtataataagaagggccactgacactctgtgtaatttgtattttcttatttatagacttaagctaaccaataaggttcactgaaagtattcattcaggaagagataatgaatcaaggcattttaagttgaatagaaaatgtccttctagattctaagctaagggatggatggcctttcaaaataatgttttttatttaattaaatcaatacttctcaagtaattactggaatttgtaatgggtatatttatttcctgtggctgcggtagcaaattaccacaagctgggtggcttaaaacaattgaaatttattcacttaacagttctggagatcagaagtctgaaatcaaaatgtctttggagctgttctccctgcagaggctttaggggagaatcagtaacttaccccttacagcttctgtggttgctgacattccttggcttgaggcatcatcagtccagtttctgcctccagcttcatatggccttttacttttctgtgtgtcactttactctgtgtgtttatttttaaactccctctgcctctctcctataaaaacacttgtcattggatttaggacctgcctggattatctagtatgattttcttatttcaaagttcttaatttaattacttctgtaaagactgtctctaaataaagtaacattcacagattcccaggcattaggacataagcatatctttttgtgggccaccattcaggctactatgaagaggtatgggggatgtagtcaaattatgttttctaagttaatataggggccaagggaaaattttcccttctgcctctgaaggtttgctgaagatcagctgaagaaaggccgattaatagcagaggcatgcaaaattaattttatcgtgcatagcacaagggaattacaagagaatgattgtttatacaatagtgcagtgggggtacagaagcttatatactcttcacagaggaaagggagatgtggataattttaaggtgaaaagtgatttttaggggaattcaatgggcttggagaacatacgtcttgagacatacgtcctcgtgcatcctgagacaaagccttgtgggcccacagagaagacagtggttctgtccaggtgtgttgacagacttcagtctttattcctgcagtatgagttaatgaaaactcaaggaaaggaccagtggtaattttcttctttgaagagtctggagtttaagcagataagggagtatcagagtaaagcttcttctagtatctgccagtctccaagggcctttaatttaaaataatcagcataccagggtgccatattttggggtgaaatttcctggtctccttcaatagaaaaaaatatctaatttatttgcagcatttctatttcaaaaatgtaagcaacactaagcactttgtatttaagatgcattttaaagaaatggaaatgagaattactaattcatatttatcagctgacatatatatgggactatttcactcttttgacaaaaaatttattgtttagtatttacctgtttagtgacacatttaaatggctgccctttttaattgtaatattgtgctttttatatgcctctttcattttttacttcattttaatgtacagggaatcgttatgctattagattgtaagacatatgattgcatatactagaaacaaataggtatttgtcttaactgcctatgataattgaagtagattttcatttttaagagtttgaatgacattaaataaattttaaatgtaaattgtaaaatggctaatttttctctgtgcaatataattttaaactttattgcttactagctctttcttgacattattgttttaaattttgacataaatggcaggttgaacaaaaacaatagcagttcattttgcattagaaattctgttccaggcagaaacagttgcacagtctaatggaataacttactttcttattgttaaaaaactttcaattgtaaaactgaatgatttaaacaaaataaataataaaggtatttccttctttctgacacttttctttagttctcagtgaactccatgtgagtagcctgctagaaatatgtagttaggcttaccagtaaggaagcatatacacttttgactattagctgtagcctttgaagaaattccctttatcattaattttattctctttctttctcattagagaaattgtattctctttctttctcattagaatccagatttttgaatatcattatgttttgaaaatattttgtagaataaacaagggcaccatgtttaagaaggaagaaaactaatacttatttagcacctactgtattccaagcatatgctaggtattacatgctgtctcctcatttattcttagaaaaactctgtagatcagtattttcagtacggtctttttcggcaagggtaaactgaggcacagaaagatgaagtaaattgactagggtcccacatgtattgaaaggtaaggctgagattttcatctagttttcactagtttcactaaaaagtgatagtctctccagctactcatgaaaatgccttccaatttttgtaataccttacatttataaatagcatttcttatggaaacttaaccaagtatgtgatctccttggggttaattctggaaggcctcaccttgagagaccctcagcatggactttgtaggcagcaatgctatgagtgcagtagtcagtgtagtgtttagggcattaggcttcatgtaagccttttgaactgatatatggttttatagccactacctttttgctgagaaaaagaggacagaaatattaagtaatctcacatcttaaaatctgatttattaaaaagtaaccccagttctgcttctgaattaatgtatgaaaatatagaattagaggaaggctgtaaattataaccccaatgaaagtaaaaatatctaggccttcattttatacttttaaatttatgtggagtcatggtttacaaagatgaataacaacatagttaggttaccattgccactatactatgtaatatatcaattatgggatttcaaaggaattatttacaaatttttacttgctcagctgttacaatttttttaataccaaataagcattctagggtgaatgccttcatggattggtttatgtatggggaaaatattttaatattttgaatatgagtcataaaatagaagtttgttgtttattacctatctcacgatcattttaaaatcgtcatgctgtattttgatgtcacagaaaagcaattattgaaataatgctgaaaatactttttgtaactattctacagcaaaaaagcattagtctgtaataatttatgtgtactttatttttataaaatcatctatttccagacgatatagatgtagaagagacgggaagagaaaattgtcttaatatatctaatggtgaggtatttcttgaatgcttactaaatgagttttttttaaaccctgagtgatctttatatcaaacacaaattcaaaattatagtagtctattttattttctttgttatccctactctccaacaaaaaacaaatgtcagaaacctttaagctagtttagtatctcttcagggtcttagcttcaacaggagtataatattttacttgtgaaacaaggttgtcatctagtggtgctttcaagtagtacagctttcacaattagctagctgatagtcttcagctttttaaaggaagtgcttaacaaaaagctatctaggtttaacttttcagaatttaaacacttttgaatactgttaaattagatataaacttacaaaggattttccctagaaattttttaaatttccatctcaatttttaaaataaattttttgtttggctactgaaatactgatatttgaccagtgtggatgttaaccatgatgatatcaaggcatttcatattgttttgcatcatcagaagttgtttatttagaagaagattcttaaatagtgttaagtaattaaaaatttttttttgcatattaatcctttcaccagcctgagcaacaaagcaagactatctttaccaaaaaaaaaaaaaaaaaaaaaggtggaactaatgtatatttatgatggcaaagaaatcataaaaactaaaaactgaaaaaataatgcatattaatagatagttgattaatgagtaaaataaatcttatattgaaagtagtttactacattaagattaacactacatgctggtacttagaagtactttaaatagtacgtacctttatttatctgatccatttatatataagccacagagaaaattaaatttttaagctagcattgattcaagtcctggtttaattgttggaatacagattgtggtattcaatgtgggataggaagtggctactttgcctagacaagaaaagaaaatgtggtaatattaatagaagaggtacttagttgttaagggaaacaaaataaaagacctcttttttcattttccaccatttttcatagtactcactcctctgaattaccttttgtagaattctgatccttctgtttattatgcttaatagagcttttgccatggaattcatggattcattcaactaactgctggtgttccattttatattctcatgtgctatctttccaatatatctgtaagctgtattgaatatattgattttatttttaacaggttatctgaagaaaatcttgtgccccaattcttactagcatttttaccttactaatcttgttattcattatggcaaaatactgtattttcccaagttatattcataaacaagaactttcaagccattttccttctgccctagaggagggaattggcaagttaattctttcagtgtctctgactaggtatagtatagtaagagtctataagaataatatataaaacaaatttttggcaggtgtattacaatcaatttacactatggagagagaaacagtttaggcagagtgaacagagagatcttcgtatgggtaatttttaaaaaatatctttacaacattgaagttttgggaatttgcagtaggtcagttacttccatatttgctaagatcaaaaatatcctttaatagaagttattttttaaattatcttttatgttttttccctctcttgtcccaccttagcttgggtaattgggaattagttatctttattttctttgtggctaagcaagaattcatttatcaaactcccattttggtatttggatatcatgtgcgggggctagtaacctcagtgtggtagcagataatcaggtgtaggttagaaccccaaaaactgcatgaagccatttgatttgggttttattcaggggcaattaagaacaccatgtaccagtcactgtccagatatcttcttattttttttgacatagtccctatccatttgtgaagaatgttttcactcttggttttctcattggcattttaaagacttttcatgtgtcatcagcccagtttatatcaatgtgcaataattctgtattttattatttcaggaagtcaagttgcagttcagatttgaatgggcattcattatttcaatgggtggcagtgggtaaaagagaataaaactttaatgtttgcttttatggctcactttctggccaattaaaacattcctcctccttaaaaatataagtagtcctcaaagtctgaagtaagcatgggttctttatatgtccagtttgtaaaatatttatgtcaatgaccagactgaatgatttgatactttttagtgtgatgtaaacaactcaccagagaacatttgttacaggcataattgtgttctttgctctcccagtgcgtacaaagtgacctaaaagatacttggttcttttcttgcttggaaaggaagttggctatgaatgttatactatctgaggtacacttacggcacaacactgtatgtcagagacaacttggaagtgaacaggagcaaataatttaaataaactaatgtgtttaataagtacaaagtacatgtaccacatgcaggctgagccctgttttgtttggcttgtacactgctttacggaaatctaaaagctaaaaatcaaatctgacgcagtaactgctttactagtcctcgtgcagacatggctgccccctttagctcagtcagctgatgtgtagtttgccttgctccgtttcattatctatacattatagccagtgagtaagttagattcaccgattttacctgctttcaaagaaatggatcaaaagaaaattggccctcttctttccttactgatggtaaagggtggtaatggagatctactatctggaacaatgagtttaaaacaatagtgtttgttttatcacagttttctgccaattgagattcttgagctatggtttggacatgtctgttttatatgccaagtgacttctgaacacgacgtgaagacagttaagtgattctaagacggaattttgacatctcataaatagaagcatttactaaaggaagcattttctaaaatccctttttaaaaagttttgagcacttaaggctgggtgtggtggctcatgcctgcaatcctagcactttgggaggccgaggtgggcggattgttggagctcaggagttggagaccagcctctgcaacatggtgaaatctcatctctataaaataaaataattaagtgggcatggtggagagtgcctgtaatcccagctatttgggggactgagccatgagaattgcttgagcccaggcagttcaggctctagtgagctgtgtttgtgccaccgcattccagcctggtgaaaagtgagaccctgtttaaaaaaaaaaaaaaaaaaattgagcacttactaaactgcggtgacttaaaaattgcattatttgaaggtaaaattagtgagaaatatttgtctgttctgtgagtataatgcagaaatttagccttttaatgccctgcttgtcagtaaaatgtattcagatgttgtcatagtttagattagtaataagtggttttataatattaatgtccaaaatctccattagagagtgaaaaaaaaaagtgtgcttttgctggctgttttagtaaacaagaaccctctggtgtcagtttcttcttttgtatcaatgcccttgggttttaggtgttcaaagatggcacatgggaattgatgataattctcttctctcaaggtccaccaggtgggtgtgcacagggaccgtaactggagtgcctgctccacttttcagttgctttctttcctgattacctcaattaagactggtgaatcctgtgttgtgttgttcttcagttactgtgttactgaagttcttgaagcacattttggtctttgagtttttgttttttatcacttgttttattcattggtaatattggagttttaaatgtttataaaaatgaaaagattaatttgtaaatcccaaattattgttaatttaggctcagtccttctgtgacaatcgtccagtattaacaaaaggatcagtaagatattattcagggagagctgtgaatgggtgccctgtttcttgaaaattatggagtaaacctataaggcttaagttttttggttttgttatgttcagaaaaccttttataggccttattattttcttatttcaatagtttttttgggtacaggtggtttttggttacctagataagttctatagtggtgaattctgagattttagtgcacccatcactcaagcagtgtacactgtacccaatatgtagtcttttatccctcaccctctccaaacctaccccagtagagtccccaaagtccattatatcactctatatgtatttgcaccctcatgccttagctcccacttacaagtgagaacattaagtatttggttttccattcctgagttagttcatgtagaataatggcctccagctccatccaagttgttgcaaaagacattatttcaattcgtttttgtggctgagtagtattctatggtgtatatatgccacattttctttattcactctttggtcgatggacacttaagttggttccacatctttgcaactggcaaattgtgctacagtaaacgtgtgtgcatgtgtcttttcatataaggacttcttttcctttgggtagatacccagtagtaggattgctggatcaaatggtagatctacttttagttctttaaggaatctccatactgttttccgtagtggttgtaccaatttacatttctgccagcagtgtaaaccacatcatgacaacatctatggtttttttttttttactttttaattatggcctttcttagaggagtaaggtggtttctcattgtggttttgatttgcatttccctgttgattagtgatgctgagcattttttcttatgtctgttggctgtttttatatatcttcttttgagaaatgtctatttccatcctttgcccacttttggatgggttgtttttttttttttcttgctgatttgtttgagttccttgtagattctggattctagtcctttttgcatagtttgcaaatattttctcctgctctgtgggttgtctgtttactctgctgatgatttcttttgttgtgcagaagcttttagtttaattaagttctacttactttttatttttgttgcatttgtttttggggtcttagtcatgaattctttgcctatgccaatgtccgaagagttttccaatgtttagaatttctaaaccatgaaaatgtttagaattttcatgatttcaggtcttagatttaaatctttgatccatcttgagtcgatttttgtataaggtgagagacggggatccattttcattcttctacatgtggcttgccagttttcccagcaccatttattgaaaagggtgtcctttccccaatttatgtttttgtatgctttgttgaagatcagttggctgtatttggctttatttcgaggttctctattctgttccattggtatcattgcgtatttttataccagtaccatgctgttttggtaactatagccttgtagtataattttaagtctagcaatgtgatgtatgggccttgtttgaaagaaatcacatatttgacttatgtggataaaggcaagtttccaaacccttacaactctgcctttagaatttttgttagactttaccttttaatattttgtagggatggaatatttttattcttctgaaaacttgaatatctaataattagttgatattagtttcctgatcttctacgatgcagaagggaacagcatgactgcttttatcaactgagttttatacctgttcttgtttaatgtactttggagctcaccaattgaatttgtctagttctgcttttgtctgtgtgagctgaagtatctagctgattaggaaactgatttggatagctactggctttttttaatgagattatcatatcactagtatcagcattaattgtttgataaattaaacttttttttttttttttttttttgaggcagagttttgctcttgttgcccaggctggagtgcaatggcatgatctcggctcactgcaacctctgcctcccgggttcaagcaattatcctgcctcagcctcccgagtagctgtgattataggcatgtgccaccatgcctggctaattttgtatttttagtagaaacggggtttcaccatgttgctcaggctggtctcaaactcctggcttcaggtgatccacctgccttggcctcccaaagtgctggggttagaggcgtgagccactgtgcccagctgaaaatggtgtgttataatggaaagagtgctgaattgggagttaggagtcatttttgtttttaactttgcatcttctaaatttgtatttttggggcaagtttaattttacatctctaggactccttcatctgtaaagttgaagaggtgaattttggttatttttaaattaaattaatttattataatataaataatctattataatttaaattaattaatctattctagtttatctgacatcctataattctttaattctacagtttcctttctagaaaacaaaatattctattagtcattacatactatttccctcttgtgtaggagcttggaaagctgtgtttttgtaatcactcaatcagaatttaatttatcacccatatccttttgtgtactgttgctttctaaaattggtctcaacctatacttatctcttttttcttctccattttccagccagaaagctctaggatattattcctagaaggtgcttcacacttactcacttccatgtttttgattacactattccttttctgtgtttttcccatcccacagccactttgagctcctataacatttttatagttattttggccttgtatgatagctgtttatgtattgtgttatactgtatagcagactgtaaacttcttgagggcaggtgtttagttttcatcattttactaatcttgttactgatttcacacaatacttttcacataagcggggcataatatttatgaaagtgaatttataagattattaattagagttacagatacagttggacaatttttcattattcatagtgaaaaattaacaggataataaattattatagccattttgagttaaagcagtattttaaccatcaaaattgactgcagatatttgtattccatggtcacttatatactgtcattcctgcctaccatctattcattcttactgactcatcgatatatttgtattttctctgtcacccatttaactacttgccttcatttatcattgtggtttaacagtgtcatggtcttaaacttttaatagtacctcattttgttaacattcttggtttgacttaaatatatatttttctgacttttatcgccttggtcttgctcattggcttatctactttaatcttctattgctcttctgtactgttctaactattcacatttcttttcacttgcttttttactttggagaaattattctctacttcttaaaggcacttttttttggttgctatttctgggtaaggtttactttgataagtatcttagaatcagtctagtgttgagagttgatggtggaattgctgttcatcaaaaatgagcttgagttagatctcttagactagcagtcttggatccttttaactgtggaagaatgtctgcaatggtgatggtaccattagccatttggttaaaggggttgatactgattataaaaaatgtgagatattaattggggtttttacaagtggatttttgatggttgattttagaattgttgagtttatcaaagagtttcaaaatgtccatgggtatgggtagagacgaatttttttccttcagattcagtaatctctttactcttgaattaattgtctctgacagatgcatggctgatttggactggataaaagaaaaaagggcaaataagacaatgcgtaaaaaaaactgaaaagagataggaaaagtaaaagatgtattgtaaaaagttgcctatctttgtgttacttggaattaatagcctttattgaaggatccttgagaaccttatgtgaaagaaaggggacttgagaagataatgtgagaaagtccagagagaagttctgctgtactcagtttaaaacagtgtttattttagttttatttttataacacatctcaatctctttttaagatcttatggtattaacagatacttaagtcgagattatatttgtataatagcaaagagcagcttatacatcccttaagtatattgacatttaaatagcttttctcagaaagcgtatgaataatcctattgacacaatagctctttaagggtacaaaagaaaagtatgcactgttcatctcttctataagacatagtaaataaacagggaatccatatccaagactctttccctagtatttgtagcagaagcactttatagtagaaaacaaaattgcatgtagacttaagaattttggttaattttgattttagataatattaagccatttattttattttaacaggtatctttcagatgaaggcattgaagcttgcacaagctctccagacaaagtcaatgtaaatgacatcatcctgattgctctcaatgtaggttatatttattaacttgtaaacatttgaaatctggaagctgtattcataaaaaagtctcagagtaaattgggttatatgataacaaatatagagaacatctttcttattttgtccattttaagttgtagtgatgatgtttgttgaatttaataatctcatattagcaagttattaatatctgttatacagaatccaatgaaaaaggaaaaaatgaaattaacatccctttttttcacccactgatcagtcatagacttttttaacatttacaatagctacgtaatagtagtaaaaactgactattcattaaaatgaattgccatttaatttacatagaaactctagctaggttatagctttttgacagtggtatttattgtttcaaaataacttttcatgatgatagaaataatacttattgtggaacatttcagaaaaaaacagaaaagcaaaataagaaaattaaatctgcttataattactattaatgttttagtgtatatttcttttcaactctttgtccacccaaccctctagctgttttttttttccataattgtattggcttttgggttttttcaagagttataaaagttgtttgaaataaaaatgtaagtaaacaggctgggcatggtggcccacgcctgtaatccaagcacgttgggaggccaaggcaggaggatcatgaggtcaggagttcgagaccagcctggtcaatgtggtgaaaccccatctctagcatagatacaaaaattagctgggcgtggtagtgtgtgcctgtagttccagctactcgggaggctgagacagaagaatcgcttgaacccaggaggtggaggttgcagtgagccgagatcatgccactgcactccagcctgggcaacagagtgagactctgtctcaaaaaaaaaagtaagtaaacaaatgttcttttctcattcctgcaattaccctctgattgtttttctatgtagctttataataagctataaacaatcaaatgtatgtactacaatatgtggtcaatgaaattcctaagagaactatagtctgacaaatccatcatatcactgcaaaatcaatgtaaagcagaaatgatgggcacaaggaacatttaaaacataaataaatgtataaatctaacgttaaaaaagttacttaaatttatatttatagaattaaacttgggtttaaacagataaaatttatgtcctacactgagtcatctttttttcagcttctttgaattttacttaacaagacaagtaagatcattttattttggtttctgagctaagtatttaggtttttaataaataaaagactaattttttaataataagcattagctagaaattatgcatgttatttatgactaaaaactgtttgtcttgcactgaaattagttaattctattgcttaaaaatattataaaggactcttcttgtttaagaaaaactttctacagattctaggaaagagattttatgacaatttgctggggtttttttttatttatattcttaggtaaatagcaataaactataattggtatgaaaatttgaataaaataaatcaggatgaagtatttgtgctgtgttcgtaagaggtgcatgctgactattatctgaatgagttaatttgtcttttttattttccctgaaatatgtggttaaatactgcagtccaaagctatgatgccatatgataggaaaaaaaaccattttgattagggtgaagcctataccagacaaatcatctatttttccaaatttatcatcttttaataaaatttaggcatttgtagtattctgttgaatttttttcaacttttgagtgattgtgggaaattaaccacgagttgagaaagacgtgtattattgattcttattgtgcatatatgtacgtacccacacatgcatagctaattatatattgggaggataatccatgaacaagttttcttctcttctttctatggggtagacactgagcttgttcctttatctgacaatgaacactgcagtaacatgtatatagtgtttctctccagggaagccctctgaagactaatacccaaggcctttattgggctgcccgcaaaggtaccagaatttcagatccctcccagaaaacagatgtccaccataaatcatattgtttatatgaataatccatgcagtgaattacatttttagttagggagtggtccaagtgcaaagtccctagctgccagcctagggctaaccttgtaagctggcctttctaaagatagctgcctcagatctgctatgtaacttttaggcttagctttttatgttgaaaaggaatgtttttaatttttgctttttaaattggggagtaagaatattaagaaatgacattgaaatccagcatgtaagttttacgttcaaatactggaattattcagaaaaatatttaatgatagaccagtcttaaattactgatcactatccattagtaaaaatttaaaaacaaattatatttttatttcttttaagattttgtataatataaaatgattcaccaagtagatattatcttgcatttacttaagtaaatagggattttatgtgtgtgtgtgtgtgtgtgtatttatgtgtgcatatgtatgtgtgcgtgggtaggtagatgctttgaaaattatttttaaagttttacaggctaaaagttttcctgtattattattttttgttgttcaatataacagcattcttggacccagtcatcgtcctagcaatcctgatacaatggcatctgaataataaagttgtctttatagtgtgaatttagggcatttaaagatttggtagatcattttcatcttgctaaaaatacatcaaaataacatttgtatatttaaggacacatactatatatatgtatggcactttagaaattatgtaaactttgagcgtgtagtctttttttagcctgacaacaactttgtgagataggattggtggtgtttttccattttatagaggagtaaattaactgggtttagagaattagtgacagtgtcctagatcatatgattctttaattaccgttgggatggatcaaagtttaggatttttgtctagtgctcatttactttacagtgatggctcattttcacttgaattaaatttcataattattgatgaaaaccagaaatgagggaccatgatatattataaaatttgtatgtattctgtttctcattcatatttaaatatttcagcttttgggtgacttcaaaataatgtaaatgttttcatgaactgttagttacattattgatatgatggttatgtatgttcagatgattaaaaaaagtacatgttttatactcactaaaataaacagaatggctaacatttattgagtgcttactctgtgcaagtcattatactgagtgcttcacatctattaatgtttaattataaaaccgtcttaatatagggaaggctggtgtaagaaagtatttttttacacttatgttattcagtactttccaagtgaaaaggcgtacaacgtgaggtacggtttatatttcttttaattctgtcattggattgaggttgtaaaaagcataagtctaaagcattgttacacatgagtctggatttggctcttaatttgccatgcagttctatttagtgagttttactttgagtgatccctgcattacattaaggaataaattatgaatcacagtagtaaaaaactggaaagaatctgtagggattatacaacttatattctcatttcttaagctgactacatgtggatatttcaaataggaggatgttttattatggtaggtgttaaaagaagatggtcctgcccctctgtatgtattcatttcacatcacagtaattttaatcatctagtgttttctccttaagtctaacaaaaatttttcccttataatttatgtggttaaatgcactttaagtctgttttcttttaacttgttcttaaggtgatgaagagctactgtttactatattataaggaaaaataaaacaacacaacttcagttattatgctaatctcactatctcaaccatcaggataatttattagtttaaataattggatcttttttatgagtactgacagttttcctgtgaacaaatctcttaccattcctttatattttcactttctaaagaggacacagtcgtaaaatattctgctttttatgtagattgtgtagtcagaatttccttttcttatgtcatgaatgctatagccttgtttttgttagtccttatattttccttgttgagttacaggtacttctgcattttcatagttatttgtttaccaccttctatttctgtaacttgtttaagcaaatgaaattactatagtaaaggttactataacttctttggtattccagtggtattgtatcctgggatattgtatgttatatagctttatgttacagatatcatagcctatagggcgatatgtttttatgtaatgtcaaggttatatgagattcagttttaaaaaacatactatgtatatgtattcaaaagctgtcatttgattttggaatgtgatattttttagtaagatcacaatttacataaattaagttttggattttaatagagaagagttagtaaataaaaaggttacctaaagaaatatgaccaggattaaggccttatgtgttactgttcatcttactggtatactttaaacaacgtattatgggacactgttacttgaaagattgataatacatgtagatctcatgaccagttaaactgaatttttgtttcacaaaccataagtaatttcatcttttgttcatgaggttagatttaaatttactcttttctataattccattttaataataatatttttattttagacagatctgagaacaattggcaagaaattcctccccagtgacatcaatagtggaaaggtagaaaaggtaaagaaaatcaataacttcttacattaattaatttagttacaataaatatgaactaaattactggaattactttttgtcaataaagactgcaattgcaaaatactctggaggtgaacaggtcacaaagtcattgttatggtgacttccatggaaaattattaagaattcaacttttggtgacttttcaacattaaaaaaaaaagcaaccttttgtttcagaatttgtaactatggcatgcttacatgaacggtgagacttaaaaccagatgtaattggcactcattacaatgaccttttcttacctttcaattttatttacctttttattttagttaccttaataaactgttatgtttatttaatgaacttattatatacaaatataagattatgaaagtattaggagcaagttggtgaagctgtgcatttgtctattgcaatcattttgcagtacacacatatgtattcgtgttatgaatttttttgcgtcagcaaactttaattatatttttacctaaacattttatgctgcaagttaaagtccatgtcttctttgtctttcatcaggagaaatggagtacatctggttaccttcctttgtaaataattatatacgtgaagacataaatgtcagtgccacaggtttctttttgctaaagccatctatcttgattcctttgtttattttagtctcaagctttacttttcatctctattgttcttagaatcctctccagtttctttacatttctttttcttttggttatagtggctatctcagacttcagtgtgcaccagaatttcccagaggtctggctagaacacaaattgctggacctcaaacaacctctactcccatctgagtttctgattcagtaggactaggatggaatccaagaatttgcatttcgaacagttttccaggagatgtagagttctaggaaggatacttagaaaagtaggcaacaatcttgactaggtgtgttgaatgcaacaaatctctataggaaaagtaaataatatcaaagcagtgtctgtacatccttacattattttacttaaaattttgaagctttctgattcttggttttctgctttctctgtgtgtcctaaaaagatgctgagaactcacctctgctacaagctcatagaatagtagtacagagattcttgtctgctcccttcactctttcagagtgtttttacttttaaaagttttgcacagtggtctctttaagatttcctttgaatgtagctagcaagaagaaaaataactttaaaactttctgatctagattattatgtcaaattttatcttttaaaacattcttaatgcaaatgtaacttttcacatgaaacaaaaatttgatatctctgcttgctcttcctcattgattatattttttcctttcattacatacttccaacacaatattaataaactaatagttttctagaattattattcacagaattattattttttctgagatggagtcttgctctgttgcccaggctggagtgcagtgatatgatctcagctcactgcaacctccaccacctgggttcagttgattctcctgccccagcctccctagtaactgagactacagacaggtgcatgccaccacgcctggctaatttttgtattttttagtagagatggatttctccatgttggccagtctggtctcaaactcctgacctcaagtcatctgcccacctcagcctcccaaagtattgggattacaggtgtgagccactgtgcctggccttctcacagaattattcttatatgtcatataagaatatatattattctcacagaattaataattgtcttcaccagtattaatgaagatgttttgaaaaataatttaaataaacattttagaagctggcacacagaaattactcatttggtttgtctttagctaaaaatccatatgttatataaaaatgtaactatcttaaaccagagtacatattcaaggaatatatttttgatgtgaatggaattattttggtttctttgttagtaaaataagactaatatagtaaaagctccttatttatgtcttcattggaatgcttttattaaccagcattttaccattaatgatgactataaatgcatgactctagaatcagtcactactgatccgttacttactaacattatgtaagttatagttcttgtttaaatcaactttgtttgaatctgtgcataagatacaggacaacagttggcaaacagaatatttgaataagtaatctgcctatctcttgaccatgccagattttggtataaaatgatattttctagttttctttttatattagaaaagagtgaaagaaagagctgggttatccagtgatctttcaaatagggcgtactaaaaaccaatgttccaaaaactaacttagaaaacttaaaatatacaatagactatttcaagaagcagaggaggcatggttgtggcatgtttctgattgagggtggagaggcattaaatgatacggaccaggaacagattagagacatccagacatagggtcattgccctggatttaaatcttctttctcctgcttattggtttttgtgacttttcataagtcagttaatcttgccagattttaatttccttatcatttaaatactactcccttacaacattgaagacataaatgagataatactaaatccagtacaatgcatatggcaagcttcgagaattatgagcaatttaggatggtatttttatcttgaaagtctaagaatatgtgaatccttattatgtcagctaggtatcttgttactgagagatcttcaaggggattcaataaataaggtaaggcaaattggtaaatcattattgtctgggttttggccccaaaccccatgcagaattctactacttgaggtaggttggtctctggtagaatgaaagcaagctaaaaccccttctctgactgtttctactaagttccaagcccatctgatattaccatttctgagagagaaagccaaaggagagtgaggattggagagcatttggcccagtatttaagaagcaaagagttaaaaagcaacatgttgcggggaggagggtgtcatcttagtagaaactgcctccattaacgttgtgtggtgcctttgaaagggcctcacccatgtattttccaaccaccttggaatctcattcactaggcctgaggctcagtacaatgcactggagcttctccaagacatatcagtaatcttttttggaagtagattaaaggagtgtagagacgagtcttcaaacttcatctcctgaaagcccaaagtaaatgatcacacagtgtgtattattatttttatagttaataagacttagataatgctgttttcagcatttgggaacttgagagtgggaagggagaatggagagctgatagatctgtcatcaggtaagaaagattgtaagtctgcagttagaagaccagctaatcctggacatattgaatttacagctctcattctaagacgcatcagaggccttcagaaaggcgtcgtcctgaagctttgaaactgaagtcttaataattgctactatcattgattattttgggagaagacagaatggcaaaaagtagaagtagctttattactaattaatatagtagttttgctcaggttcttttctctttcttccattctcttcttaacatacttttcaatttctgtcttttctccacaaagtttccccagaaccttgatgcaaaagtttcagaaaaatttaaaaagtggtgagagttggacaatcacaattttttccaggcttccagattttcttataggcacttcatatttgattcaaaagctgtaaaaattgtgactggaaggaagtgtggtagggaagccatattatgcaacttattttctgagtttttcagggcatgctttgtttttcttggatattacaaagtcctaggactgctgtagcagcttgtaagctaaaaattatggaaaaagtcatgataaaaaggaagtataactgtttaatattcttccccaattttaatattttgctgtagctttttaaacctaggcgtaaaagttaattataaaatacagattagtttcaaaatactttcttatcaattcagctactcgaggaccttatgtactgctatggagtcctaactgtacagtctttgagttctgtgtttattttttctaagttctaagaatgacaggttgtatatacctttttaaatgtaaaactatgaataagacctaattttcccaagtaggagtgactggtctcaaaacctcagcaatactgacatcaaccacaagatggcttcactgccttaaaattcaaagtgaaggttctcttgcccttggatagtctagaaatcggatgtttttaaaaagaaaaggaattgaaaaaagttttaacttttgatttaataaaataatatgtttcctatatgttagtctgtgttaagtaatacaatttgtttcttttagtgagctatatattaaaattaaacatctacttgtattagaaaaaatggattactaaaactttcatgctttatttacaagtccttattggtaattactaataggacttctgtggagtttaaatagataactgaaaaataaactattcaacttacctttttctgtttttggttccaaggaacaaaaagttagagaagtgaagaatagaaatgtggaaattgtcaaatgatacactgggaaaagtgttgcttttggctggtagtcccacatactttccttgtattcatttgctataattactttgtgattgaatacgagcaacttatgtgccctactgttattttgagggttaaattgaggctttttactttcagggaatcttacgtttgcaaaaacctattcaagattatgttgtcaatttcttaattataaggaatttattaaatgttttaaaaattcctaaggggtagatcttctagtaaatatacaactatatttataatttagaaagttttaattttattatttactttccacttaaactcctttgctgcatatgaatatcatttgaaaaatttgagattaggattaggtactcccttccctaaagctatttctttcaatattcttgatgcttttgtcatctgcttccctcttgatcttttttggcacaagcacctaccttacctaggagaaccctggtttttagtgaattctaataattcttgttcttgtttttcttctgtcatttgttgagtacctattctatgctaggtcccatgttaaataatttatatgtattatctatacaatattcagaacaacacagaaaatataaactattatagccttcccttttactttagagataagagaattgcaccttccctaagatcacagttttttgttgctagagcacctgagtgtccttccctcagctgtcagacaaactgctatttatttttcagattccaactgaggtgtgacccttctcttctaattttcttgacctcttttgagcagaattaatttttaaatacgaatattctcattgccctttatacctacatctgtttttagtatgtaacaaatattatcatacttttagaatatgcactacaaagacaggctttggcatgagatagatccgaattggaattctaatttgcctcttactgactgagtgaccactggtaaagtactttatcctctgtccttaattttcttatttagtaaatacaaataatcctagggtactttatatttctggaggtaaattaaagaacttatgtaaagatcctgctatattttctggtatgtatctaggaagtgctaagtaaattatagttaaagcactagaaaatatatttttttaatcagacggtgtctgaatgtgtatttgtgccaagagatagggatgtagagatcaagatagcctctgtcttattggagcacatagcctaatgagagattgagaaaccagccgtgtcaatgtagtgaaacaaatgctatgtcaaaggtgtgtacaataaaggggcagctgtttcagtttagtgagggtattaggttgcttttcttgctagactgttagcttttagagatgtgattttcaatgaaggaatagtgggtagatgccccatatcgggcgtatttaaaatcttaggttatagctctacggtacatacacacatacacacacagatcacgcatacacacacactatatttaatgttttctattacacaaaaagctcctttgtagtggaaactaaagaataaaaaataaagcttgacagatcttgactggtaacaatacatggaagataagtatagtggatatttgtaatttctaaaacctgaattatctccctgtgggggaatttcccattttaagagttttggtggtagagaagaagaaaatgccagatacttttctcccagcctcctttgcagctatgctagtcaggtgtagctgccttggagttgggccagttacacacaaaaaagcgggacctgtggagaatcctgtcagtaatagttgaagttgcagcaagattgtttctggagtagtggctgcaggagtgccagagtaagtgtccagagccattgagatctctggtacaagaaatagtgttagatgcttgccgtgtgctggatccagcttgttccagctcgtgaagttcattgtcggcatctttttccaatttagagtgcaataacctccagttgacggttgtggttggccatggaaattggcacaaattacagattacagtggcttttcccctgtccctctaccagaagtattttaccaacacacctctgcacacatataacagtttccctaaggaatataaacaggaatggaactctactgcattgtggaattaagccagtattcaactttacaagataatgccaaattatcttgcaaagcacttgtatcaactatgttaccttcagtattgtatatgagattcaattgagccatatcttttgtggcacttgatcaaaattttctaatcttgtgattgtaaaatacattattcttccttaggctattctctcccctgcccatacagattttagaatcaaatgattaagactcttaaaaatatcatgttggagttttgattgaaattgcattgaatctgcgcattagcttaaaaacaattgacatctttatatgatatgatattaccagtgaaatgctggtaaaatgcttctctgaagagcaaaaaatagccctgacacatagcatttgccactttctatggtataaatattccctgtttggctgattgtaagctatgttataaaatcactgaaccgggaattaggaagaaatgtacataaaaagtttttgtgagcttgcatgagctggctccagcacaaccctgggtatatctcttcctttatttttcccataaagttttataatttattggaagtatatgggctgtgcatcttttgtaagctttattcctggacctatctatttttgttattgtaaatggtgtttaaaaattttttaattactatttcctctgttactggtacatggaaaggcagctgatatttgcatattgattgtaattctgtcacctgccagttattcttacattattattcttatatattctattcttcttcttattccagatataatttttaaaacaccatttacaacaagaataatatattcttacattattctgtatattcttttgagttttctctataaatttgccttttcttggtatttcacgtgaatggaatcacatgatatatagcctgttgtatctggtttctttcatttagtgtaatattttttaggataatcgataacatagcatatgttgatagtttttcctgtttattggtgattaatattccattgtatggatatcccacattttgtccttccacttactattagtttggtgcaaaagtaattgcagttttttccattgaaagtaatggcaaaaaccacagttatttttgcaccaacctaatagtttctggacattttgatcactgttcttagttttttttttttttaattactaaatgtatatgtctcttattactgttatcagttcttaaattgttggtttgtgcctttactctttgcttcttgattactcttgtcagttatcagtttcattagtctttgttacaatagactttgttaatgttgttattgtatttttagtttgattcatttatttttcttctacctgatttgaactcactgctttttttcctcaacttcttagttcaactcattagttttattttttcaaaaataggttttaagatataccaaagaaactatgcaatacaaaagtttaacgatgaagttaaaatatatagcaaaagctaaatatgacaatacacatgaataatgtatataataagcctttcaatactagaaaactaaaatgggaagaacttactgaagggtaacatacataaaatggggactaatagcaagaaacaatcctaaacattttcccaatgactgactaagcctcaaaaagacagcttaggaaaacgagtaacatgtagtttttcttttcctagccaattcagttctacttagataaatctggttaccaatcaatacatatataaattagagtaattgtttttctactgaattagtaccagtttttctttttcaccttttccctaattttctctagcaacacttttctttaatcagttgaactcaaaaggtttggtacgtaaaatgaatatcagctcttattggaatagcacttgggaagtgcaattctagaaaaggcaaatgtttaaccgaggttcttgacaaagttaagcatcccattctccataagacagtgactcccatgttaatcactaggttaatggctgctcttggctagatcacaagaccctgcaggatactggaatgctccctggtgaggtactgtagagctatgtgaacaaacacccacccatttaagctttcagtaaatacaaagcattttaaaccatttcagtagaataaattaaaaatacggcatttctattggcctgctttgcttcttgagctggcttggagtgctgttcatgatataaaagacaacttcttaattcaactcattagttttttttgtttttttttcagttctctttaaggctatcaatttttcttctagcactgatttaactatactcctatatttacataggaaatatatgtgtatttacatatttacaaacataactttatattcaggtataaaggttttatacatggtactttcattattcagctctaaatatttttcaattaaccttatgattacttctttccctattttgattacagaatattaggtttgttttggttacggatttctaattcagttacgttgtgatcagagaatttggactgaatgatagctgtattttgaaatttgtagagtctttatggcttgatatgtattggtaaatgtcacatgtatgcttgagaagatacttgttcctgttgggtttaaagttttgtataaattttctagtttaggcttattattttgtagtctgtgtttgatacttacaaattctcaagtccttaggggcttaaaattttttttaataattttttttaatatttctcaatcttcgtagcttgtttccttgtaagtctcatgatagtttgttatgatttcatttttcttgatctttctctgtgagaatcctggccacttgaatcagaaatgcttttttgttttgttttgtttttagaagggatatgtgcttctttctgccttgagctagtgggggtgctacttgacttacagtgagttaaagtgctggctaaggttaactttgccccttggccaccagcccaaagctgaaactcttagttgcagtgttgttactgccagaagcaaacatcttctttggagggaaatgtagcccaaattggggttcaccctagatgcgtacatggatgacattgggaatgtttctgaaatttctaacaatgtatatttcttttttttttttatttttgttttcttgggtctgataccatacgtagaatggtacagggtgtatgtgacaaatcagactttatttttttctctcttcctatcccacctctattgattgattggttgattgattgattgagacagagtcttgctcttgttgcccaggctggagtgcagtggcgcgatctcggctcactgcaacctctccttcccggatttaagcgattctcctgcctcagcctcccaagtagctgggattacaggcgcctgccaccacgcccggctaattttgtatttttagtagagacggggtttcaccatgttggtcaggctagtctggaactcctgacctcaggtgatccgcccacctcagcctcccaaagtgctgggattacaggtgtgtgccaccacacctggcttatatttatttattaaagtcaaattgtgttgaaatgatactaagagatgttttgacagagaaagtaggtaaaaaagaggtcgtcataagtgctatttaaagcttatctttcaggcttttaaagcagctataggcagaattagtatttcttcttccaaggcagctttcttgaaacattgccctgttaagggcaatgggccttaaggtaaagatgtgaataatttagtcaaaaacctcccttgaaataaaagaatggatgaaaaaatgatccctaggaaatctcccctgaagccactggaaatgcttttggaagtagtgatggggtagagaaggaaatgaattaagactttaagtagataaaagaactatggaagattaaactatttcattttctcttaattttaatctactttgcaataatggtggaacattgattggaactgaatcacactcatatattccttttgggtgtatggtttgtttctagggttgatggagagtgtgatgcttatgttgttaggtatacagattgagaaatttctttctcaagagaattaataagattacaaaaacaggccaggtatggttgcccacgcctgtaatcccagcactttagaaggccaaggtgggtggatcacctgaggtccagagttcgagaccagcctggccaacatggtgaaacccatctctactaaaaaagatagaaaaattagctgggtgtggttgctcacacctgtaatcccagctactagggaggctgaggaaggagaatcacttgaacctgggaggcggaggttgcagtgagccgagatcaagccattgcactccagcctgggtgacagagtgagactatgtctcaaaaaaaaaaaaaaaaaaagattaatggctggcatgtattttcaggttaagtgtcttaaatggtttctagagttaagaaaaaaaaattgttttaagtgtttatccagatgtgattatactgtagagaattagtcccctgtcatccaaactttggagtctgattgatagacaagaatgttatttagtatgatcaataaattaataaattaacacaaccatttaaatctgatatttcatatccgttggtatgactagttaggagtttagatgacagaggtattcgtctacctcaggagaagaaggaatgatgcctggattaatggcctgagagaatatttctagcagatacttaatattgtttgttagagttagacatgcttacctggaggtgcaatgatacatctttctaagccactaaaattttttagagtaatttcttttgattttttcttattactaatacaaaagagaaaatcagacattaaagaagacttgggtgatcaagattaatcctttttattattttcatttgaaattggtattttttttactttggagttgctcttaacagtagttgaagaaagatttagaaattaattcttgtctatttttgtggatgttttagatgactttttttgagacacctttttgtgtgtatgtgtgtcacctgggccagagtgtagtggcgcaatcgtggttcactgtagcctccacctcccaggctcaagagatcctgccatctcagcctcccaagtagctgcggctacaagcacacaccaccacgcttggctaatttttgtattttttgtagagatggggtctccctatgttgcccaggctggtctcaaactcctgggttcaagcgagccacccacctccatcctccaaagtgctgagattacaggtgtgagtcaccgcacccagccttaagatgattttagattcaggatttaggatcttagaaccataacatttaaaaaattttattatgtatattttatctaggtccattacttccctatgttttaactacagagtataagaaactgaatattgtaagcagaataatgaaaaaaatcgttatatttactggtttactcatagaatatttctgaattgtggaactactaacttaaggcttgatgattcaaattaagaagtgacaagagattctgtaaaatctgtgggtttctcaggaggatctaataaataatacctcctttctaccttgcttttgaaccagttaacaagtacaagagtggcatatgtgggccaaaataactttattactgattaaaatgtattttgaagatgtggcttagtgggacagccaaatggacgcattaactgaaccacagaacatgtaggcttgtacactcactcgtagaagtgccaatccggtgaggaggctgaataagtgccccctccctcatgttccctagctaggctagatctcaagaggaagatgagtgaggctgaggccaatatacagtattttcttcgcaatcaggtaactcattccataagtgggtatagtagttatctgaggctgctgtaacaaattaccacaaacttggtggctataaaacaatggaaatttattttctcacagttttgtaggccagaagtttaaaattaaagtgtcagcagggttggttccttttggaggctctgagggagtatcagtttcatgcttctcacctagcttttggtagctgtagcagtccttggccttttttggcttgtagatgcataactttaatttctgccttcattttcaaatggtctttatactctgtctgtgtttgtttccccttctcttctaaggacactcgtcattggctttagggcccactgtaattcacagtgttctcatctttagatccttaccttaattacatctgaaaagagccttgttcccaaacgaggtcatatttataggttctaggtggacttgtcttttggtggagccactatttaacccactaaaagaggtggagaggccaggagttggattaattaaataagtaaacttgctgcttgcttggaaatcggcatttgggggcaggtgttcctccttatccttcattccccagatctttgttctcatagtcaaccagatgtaggagatcaccaaaatagtcctattcctgccctgtgtttgcatcaatggcattgtcttcaatttgtgttcctttgacagaatcttttaaagtgacatgtccactttgtgagcaatagtgagtaaaactaggtaatgtaatgcatgtgtccatttaactgtacaaagaaaaggcagtttgtcacaacacattgaaagcaaacaagagaaggtgtcatgtcaacacccaggggacgtagaactcccaaaattccatgaagatgcctagtgacctgtgttgtatggattgaataagggtgccatggttgctccagatatcgaatattggtaaagttggatttttttgactactaaacattaaataaaagcaaatgtttccctcctacatttgaatggaagtgcggtgcctaggatgcatgagtctcattttggaacatgtaggcctagatcatcaccaactgtgtgatggtttttttgcaatgatgaaagtggtctaactctgtgctctccatatatagaacacttgaaatatggctagtacgattgaacaatttttaatttcacttaattttaagtgaaaatttaaatagctacatgtggctggaggattgtattggacagcataggctagatatttgtcaatgcctaggctaaaaatatgggataccaaaataaacagaattatgagctataataaccataacatgcctgtgatttaatttaaatgtccttattttaatggcattaacaaaagccaaataaaaagttcatcctgaattagcagcttatctatacttgttaacagtttcggacttgcttcaacttggaattttttttcgtaagtgaaaattagatgaaattttagattatcttttccaattatgttctctaggcctaaatttataataacaaaattactccttttttaggcaaaatactgataaatatggagtagaaatttttcaacttaggaacatgcttgcttaggaaatgtagtgtaaatatttgtctatcatttcacatttctctttgctgaaaatataaattaatatgcacagaaagattttacttaaaagcctatttttaaaacagcctttttcccctaaggtatgatactacttaaagatgtagaagttgccactttagttaaatttacttttcagacacgtaagcagattttactgttatttctcaactttgctctaagtatatttgttttatttttatctttgattgaaatttggccaacacatataatacagcattagatttaatatcgaagttaaagtttttattttaaaaaggaaaatgtgaaaatatgtcaattacaactcatacttcttcaactttttagttttggtggtattgtatgcttcatgtataccaggagagggagcactttaaacttgatgtctctgaacagaaaacactcttttgttgttgtgttgagacggagtctcgctctgtcatccaggctgcagtgcaatggcttgatctcggctcactgcaacttccatttcccggattcaagtgattcttctgcctcagcctcccaagtagctgggattacaggtgcatgccaccatacccagctaatttttgtatttttagtagagacggggattcaccatgttggcctggctggtcacaagctcctgacctcaggtaatccacctgcctcggcctcccaaagtgctgggattacaggtgtgagctaccacacccggtccagagagcattcttttggattgctgccataaatttgattcacttaaaaaaactgcaaagttctttattttcaaggtgtcccttaatgtaaaaggagggagaagtgggatttatgggtatgatttagagtgcataagactaacaacagcaataaatatacctttcatccagaaatataactgttttcctagggttttcttttctcattaccttctgaaaatgaattcagaattattaaaacaaaattgttcttcaggagacctttttgaagttttctcttttaataccaaaacaaagaaaaaacttgataatatataatttcagtttcaatcttaattgaagttattataaatcataaagcatgactattaaggaaaagagaaacactataaatgaaaacacagccctgaatagagtttcatgactagaaagtgatttttattcttttctgttttgacagctcgaaggtccatgtgttttgcaaattcaaaaaattcgcaatgttgctgcaccaaaggataatgaagaatctcaggctgcaccaaggatgctgcgattacagatgactgatggtcatataagttgcacagcagtagaatttagttatatgtcaaaaataaggtgattggcactttattttgtgtatttgttacagaatgttgaaggtgctattcaattggaataacttaagaattttgaaaagtaggaatggacccttaattgtgtgttacagtttttcagatgaaattatagagcttttctgcatttctgcttcacctgtataaaaatagttaagaatatatggccaggcgtggtggctcaagcctgtaatcccagcactttgggaggccaagggggacggatcacccaaggtcaggagttcaagaccagcctgaccaatgtggtgaaaccctgtctctacaaaatacaagaattagccaggcatgatggcgggtgccggtaatcccagctacttgggaggctgaggtgggagaatagcttgaacctggtaggcggaggttgcagtgagctgagatcatgccattgcacttcagcctgggtgacagtgggactgtgtctcaaaaatatatatatataaaataaaaataaattaaaaaatagttaagtatatagttacttcttgattgaatgttaattataaaatgaaagtaatcttttcagttttgtcagatactttaggtcactcaattgttagaacaaacagaatttttaaaaatacggtttcatccttgacagttcagtagttgtgtgtataatagtgtgttcatcacactgtttaatgttcttgcagagttttataggctaataaattttcctaggaaatgattgaagtcagggaggtttgtgattgactttagtcatttcctaggaaatcattgggaatgattttccaaaccctttgtttggttattttaataagaatcttttagagccatgcccaatggaatggacgaaaacaatgagaaggaagggaaattgtcccctctattcttgatatttccatttggccattctgagctctgttttctgaggtggaaactttcactagacatttgcagccctcctcccacctgccttttttggtcttctttgtcattttatacactcacgtttgcagctcgggctcctctaagctttttcacttaatataaacttgtataccatacttttctcttgagcaggcatttatcaggtgttccagccctttaatccagtgctggaggtacaaaggtaaatgaggtttagatttcagcctcttagtagctcatatgctaattaagtaggcacgtaggcatacaaatattgtaagacatatataaactgagaggtctaagagtctcaaaaattacttctgcctggggtaaccaggagtggggttaaaatatgagtaggtattttaaggtgcagggagggaatagcacatgcagagacacagtgttctgacaacagaaagagtgagaagttacatttggtggagcttaggtgatttagaacagtgggtatgcgagaggaaatgtggtaggttgaggccttgtatgaccttttcagtgatttcccttcttttttcttctttcatctggtgtctgcctctggtaaatgaggccccctcctcagaagatatgtttgtcgaaaatgttgatttctatatacaaagggagatttgttgacattgtgattatattctcttctttttgaagagtaggattcgtacttttgtgtagaaacagcttttcaaattcctatgacgaattcagtcacaccccttgcaagggagctcacagatgactgagaagaaagacttgccatgtaatggctcattctctgattttatggctgtatatttctctgaggaataaaaacacaaggtcagccctgagtgtcactgcccaatctgcccagtgctgtctactgtcatcccttgttgaatttattgcagcttgaaaactgaaaaaattaatcgtcgtatgctcttcactcatcattgaagcagcatgcctacttttggtgccgtaaaaatggcagctgacaaaatagttcttacaggtaaacaatttggaagacattatacaaaataagtttatagttatcttagaaggaaggtgaaacaactctctagatgggataaaccaggtgctaatacggatgtgttaccttacatgggctttgcatttctctgcggtgcttgtttctacttttctgtcctacctcctgccctgccccttgctagtttttattattattattattattacaatgaagtgagattaaaggaacctttgggtgccaatgaaaatattaaccaaaatatactttctgaataagaattaattatggttctgaaggtgatagtaaaaattgtattaaaattttagtccctgagtaaaaagaacaaagctggaggtatcacgttacttgatttcaaactacactacaaatctatagtaaccaaaacagcatggtactggcataaaaacagacacatagaccaatggaacagaatagagaacccagaaataaatccacatacttatagccaactcactttcaacaaaggcatcaagaacatacattggcaaaaggatagtctctttaataaatgctgctaggaaaactagcatatgtagaagaatgaaattcccgtctctcaccatatacaaaaatcaacctaaatgtggctgggcatggtgactcatgcctgtaatcccagcactttgggaagtcaaggcgggcggatcacctgagatcaagagttcaagactagctgggcgaacatggtgaaacatggtggcacacacctgtaatctcagatacttgggaggctgaagcaggagaatcacttgaacccaggaggcagagtttgcagtgagctgagaacacaccattgcgctccagtcggtgtgacaagagcaaaattctggctcaaaaaaaaaaaaaaaaaaaagataagacctaaaactatgaaattactagaagaaaacattggggaaatgcttcaagacattggtctgggcaaaaattttttggataagacctcaaaaacataggcaacataagtaaaaatagaaaattgggattaaatcaaactaaaaagcttctgcacagcaggggaaacaatgaacaaagtgaggagactacctacagaatgggaggaaatatttgcaaactatccatttgacaagggattaatatccagaatatataaggagctcaaataatagcaaaaaacaaaaaaacaaaaaatccaattaaaaattgataaaagacctgaatagacatttctcaaaagaagacatacacatggccaacaggcatatgaaaaaatgctcagcatcactaaaactacaatgagagatcatctcacacagttagaatgcctattatcaaaaagacagaagataactgctatagtttggatatttgaccctctaaaccctatattggaatttgatccccagtgttggaggtggggcctagtgggaagtatttaggtcatggaggggcagagccctcattaatggcttggtgccatccttgcagtgagtgagttctttattacttcctgtgggcgctggttgttaaaaagagcctggcacctccctcttttctcttttgctgctcttttcatgtgatctgcatatacccctttgccttctgccatgagtggaagcaacctgaaaccctcaccagaattggatgctgatgccatgctgcttgtacagtctgcagaactatgagccaaataaacctttctttataaattacccagcctcaggtattcctttatagcaacacaaatagactaagacaatagcaaatgctgttgaggatgcagagaaaggggaatgctcaaacaccactgatcggaatgtaaattagtgcaaccaccatggaaaacggtatggcggttcctaaggaaactaaaaatagaaataccatatgatacagcagtctgactgctggatatatattcaaaagaaaggaagtcagcatattgaggaagcatctgcactcccatttttattgtagcactattcacaatacccacgatatggaatcaacctaagtgtgcatcattggttgaatggataaagaaaacatatgtatgtatgtatatgtgtgtgtatacacatacacacacacacatacacacacacacacatacactggaatattattccgccataaaaaagaatgaaatcttgtcatttgcaacaacagggatagaactggagagcattgtattaagtgaaataaaccaggcacagaaagacaaatattgcatgttctcattcatgtgggaactaaaaaaaattgatctcctggagatagtaaaatggcagccaggaaggatagtggggagtgagtgataaggaggggttggttaatgggtacaaaaatacagttagatagaaggaataagatttagtgttcagtggcataatagggtgactatagttaacagtaatttattgaatatttcaaaataattaaaagagtagattcataatgttctcgcaaagaaaagataaatgtttgaggtaatagatatctcatttttaccctgatttgatcattacacattgtatatatgtgtcaaaatatcacacatacccccaaaatatgtataattatgacaacacaaaaataaaaatttagcccctaattccttttgtgggaatagaacttgaatttaatctggtcagactatcaattgtttcagtgaaattgtaggtccagcttcaaataacttgactacataggtcttaggtaaatgatctaattcattagcaatttctttggaggtaaagagtacagtagcctggtgtccttggtgcttatttttatttatccttgtacaatgactgtcagagttatgaaaatctgaatttgctgattgtctggaattgggaacgcttcttcactattgtaattgtattcagctgttgctgatcttgaacggtaatagatggttactacatttaccaccacagctctctacttaagggttaggttaggtaaggctgttcatgaccatttgttttgtcagttgtgattgatcactaaaaatgattaagcttggggccctcaaaataattttttaattgctttattgagatagcattggtgtataaaaattgtatatatgcaaaatgtacagaataatttttaatatataatctatcttactctgtatgggctctttgaagctttaaaatcagacatcctctatttcttcttaataattattttattaattatctttctccaaaaaaggccagtgatattagcattcttactggtttgctcttgcatatattagcatgtggtgaattttatgaggttttaagatgtgaacaatgcaaagccatttcagaataattttctaatttatcctaagtatttaccttagaagtactatttgcagtacttcttgctgtatgtgagaagagatggggtggggcttggtgtgtatgcttttattttagaacagacctaagtgacagcatggatttctttccttgttttcctttgccagagggttaagagggtaaacattttgtctctggttttctataagaagagtcatggtgtaatgtttgccccaaatctgatagcctactatagaaatgttcttttaaagttagtatataaatagcttaaaaattagcatataaaaatccttttaaagttagtgcataaataactttcatttgatctttgacttgatggtgaacaaaaaaagagcattattttgtataaatcactatggctcatatagatgttaaatttttaggtttattactggtcagatatcttctgtattgaaattcaactttgtaacaaaaaaacagtattttttctgtgcacagctaaagctcagagggaaaaaatgtcaaatcttatatagcatagcatagttgaaaaagtattttatatttttattctatttatcatgtctttatcacagcttagtgacatgtggttattgtccacctttttttttcttttgcaagtgaagactaaacctcatttctttgtcattgagatagaaaatgacaatcttggccaggtacagtggctcacgcatataatcctagcactttaggaggctgaggcaggtggatcacctgaggtcatgagttggagaccaccctggccaacatagtgaaaccctgtctctcctgaaaatacaaaaattagctggtcgtgggggcgcatgcctgtaatcccagctactcgaaaggctgagacaggagaatcacttgaacttgggagacagaggtttcagtgagtcaaaattgtgccactgcccactgcacttgaggagcttgggtgacggaggctctgtcttttaaaaaaaaaaaaaaaatcttgttcctggtcttctcacttcctctctggtggtctattcatatgatatagtcagcctcctgaaaaattagttttggtgttagtgcattttgaagaacctgattaggtcataatataagactgaattccagttttgggaaagagcttcaaatgtgtgtgtgtttttttgtttttttgttttaagtttcagggtacatgtgtaggatgtgcagatttgttacataggtgatatgtgccatggtggttttctgcacctatcaacccatcacctagctattaagcccagcatgcattagctgtttttcctaatgctctccctcccactaccccactgcctgacaggccccggtctgtgttgtttcccgccctgtgtccatgtgttctcagcttcaatatgtttttaacacttttctctttgctttagcctgaacacaccacctggaactaaagttaagctctcaggcattgttgacataaaaaatggattcctgctcttgaatgactctaacaccacagttcttggtggtgaagtggaacaccttattgagaaatgggagttacagagagtaagtgtaaactatggcttgaacttttgaaacattacactcttttttattgcattaaagagctctttcaataatgagtaaaattagttctttgtgtcggagttgaatagaatggaatatgattatctttagagaaactatctttgtctaagtgtattgtttctctaaagtagatatactttttcagtatttgttacattttattacttatgtttaaacattctttcctgacaagtttcaaaactgtcaagataccagttataagctatgtacaatttatttgtgtataattctttctgcaaaaaacaaaagtgcatctatgtgaatatatgtatacctgtcttatctacagacacacatacgtgcaagtaaaagtaagttagaatttcactgtaatggaggagttcttgttgcacttgacttcctagtctcattagctaatatttttccccatttatattaacaatatcttcatctttccagtcatgtaggttatcttgtaattgttcctctactttgcttccaacaaccatttctgttgatccattgcagtcaaatctcgtatcacttccttgctctccagttcttattattactgtagtgtaggtctttagtatctcttgcctggactgctgtattagccttctgactgtctatccacatatcctttctccatcttctaatttattttatgtactttcaccaggttttcttccttcagcatagttgagatgcttttatttcaaatgccttaatttgagattgaatgccatttatattctagccctagttccagtttacgtttaattttcaactttctaaattcttccacatagatcttgttgtagccaaatggagttgcttcgtctttctttgatgctctatgatttcctcagttatacatttttaattaaacgtttttccatttttacattattcatcttgttttttctctcctgatccccgcatagccaaatcatccctgtgcttttagacccagatcaaatgattgcttcttctcaaggtgaagtacttgtttccttattgaattctttaaacattttattctttttgtgtattgctttttacctagcactaaaattatgttcatttctcatctcctgtaacagatagtatgcttctgaggtcagaatttttgtttgtatcatctttcttaagttctgcacgtatctgttgaacaatgtgtagatactgtgctgggatcttgcatctgtatctcaagttatcctcctagtagtctttataagggctgttaaataacttactttatgattagacagatgatggatctgagcacaatccaagaccatttttttctgttataccagagtagcctttttgcaatctccaaagcagtagctctgaactttacatgtaatagatgttataaaaaatacttgtggtataaatgaattacaaagcacataaaaaatatttgtggaacaaatgaatagcaaaactgattactcctcgagctgaaatgtattcttgtgacaccctcaaatcttgcctgttttgtaaagtcagccaaaggcctaagcaatatttcaagcttttggtattttgtgatacactactctctcctattttcttagttgggaagtgcctgtgtttgggaggtaaatagataaggaccttaggcacatttttattccttagtactaatttcttatgatactaatgtgctgtgatttgggttgctgtactatgcaatataaagtaatgttccacaactgcattgtttaattgaaaatgtcccaaaaaagtaattcagaagtagcttaatagttctacataaacagccaagtttgtgaactttgaatttcctggagaaactacccatttcatgtgatcttttcatatgttgatataattgtatttttttaatcagtagagattttttaaagtgtggtaaaaagttctcaactctaataccttatataattttcccacaacccagtcccatagccaggaccactttgctaacaactgtaaacattcctagtaaccttctcaccaacacacacacacacatacacacacacacacacacacggagtttagtagtagtttaatagttgcccttgaaatgtttaattatatgtctctgcacttgacttcctgcaagccacattagtatttcttgttagggagtgataaaaatttacatttaaaatcattttaaaacattttaatatgattatagttctttttggctttatagtttttgatttggtagccacagcaatgtaggaaacagggaaagtgcagttacttgagcagctggcagtgatatacatagaaattataaaccataaagctaatgttggaagtgaagaagcactaagcattcagtaaactatatgcaggcattgtaactgtagcaagttggtgccagatgtaatttacaaaatactgtagttctataagttttagtgcccccaaactgtagattaaaaaatgtttttattgtggcaaagtatacataacataaaatttaacattttaaccattttttaaatgtaaatttcagtggcattaagaacattcgcattgttgcacagctggtaccaccatccacttccctaactttttcatcttcccaaacttaaactctgtacccattaaacagtaactctgcattccttcctcctctcagtcttgggcaaccaccattctactttctgtctctgaatttgacgaagtaactcatatgtgtggaatcatacagtatatatcttttttgtgcctgacttatttcacttagcatagaattttcagtgttcatctatgttgcagcatgtgtcagaatttccttcctttttaaggttggatagtactctatatctataccatcttttgttcatttatccatcaatggacattagggttgttttcactttttaagtcttatgaataatgctgttatgaacatgggtacacaaatacctctttgagacccagctttcaattcttttgtgtgatctagaagtgggattgctggaccatataattgtatttttaattttttgaagaattgccatactgttttatatttactttacactcatttccaccaggatattacaggggttccagttttttacatcctcaccaacggttggtattttgtgtctttttgatagtagccattctaacatgggtaaaatagaatatcattatagttgggttttttttttttttttttgatatggagtgttgcccaggctggagtacaatggcacgatttcggcttactgcaacctctgcctcccaggttcaagcgatctcctgtctcagcctcccgagtagctgggattacaggtgtgcaccaccatgcccagataatttttgtatttttagtagagacggggtttcactatgttggccaggctggtctccaactcctgacttcaggtgatctgccggtctcagcctctaaaagtgctgggattataggtgtaagccaccatgcccggccttcattatagttttgatttgtatttccctaatgcttagtaatattgagcatctttttgtgtgcttattggccatgcgtagatcttctttggagaaatttctattcaagtcctttgcccatttttaatcaggtcagctgttgttgttgttattgtatgagttatgtatagattctagatatcaattcctactaacataatatgttttgcaaatatttttcccatcccatgtgttgccttttcactgtgttggtagtgtcttttgatgcacagaattgttgaagagtttttataggtttagcttttatgcttaggtctttgatccattttgagttaatttttgtattagtaaagggtccaaattcatacttttgcatgtgaatatccagttttcccagcactactttttgaaaatagtgttcttaatgaatgatcttgtcagccttatcaaaaattatttggccatatatgaacaaatttatttctaggttatctgttctgtttcactggtctaaatgtctatctttatgccacactgttttgattactgtaactttttattaagtttcataattggaaagtgagacctttttcaggattgttttggctattcagtattgagattccttatgaattataggatagatttttctatttctgcaaaaaaaaaaaatcattggggttttgataaggattatgttgactctattgaccactcagtattgatatcttaacaatattaaatctttcaattcatgaccatgggaagtccttttcacattgttctaaattgttagtgtagagaaacacaactgatttctctgtgttgattttgcgtactccaactttattgaatttagtattctaacagtttttttttctttttagtgtggaatgtttggagttttctacatataagatcacgttatctgtgaagagttaattttatttcttccttctcaatttgaatacctttatttatttttcttgccttatttagccctggctaaaacttttaatatagtgttgaatggaagtgatgaaaatgacatccttctcttgttcttgatcttagaggaaacaccttcagtccttcactattgaatatgatgttagtggtgggttttttatatatggcttttatcaggtttgagtagttcctttctatttttagtttgtcgtatatttttattataaaagtgtgtttggttttgtgagatgcttcctctgcgtcaattgagatgatcatgtgtttttcccctgcttcattctgttaatgcgttacattgattgatttttatatgtcgaagcattcttgtattttgggaataaatcacatttggtcatggtctctaatgctttttatatggtatgggattctgattactggtttttcattgatgatagattacttttttcctaatttctaaaattttggtaaaatacacataacgtaaaatttaccatcttaaccatcttagatgtacagtagtttaaaacacattcacaaatgttcaacatcactaatcaaaatgtaaatcaaatacagcgagatatactaccctacagccattatccattacaatgtctactgtaaaacaaacaaacaaacaaaaacccccagaaaatagcaggtgttggcgaagatgtggaaaaattggaactaagccttgtgaactcctggtgggaatataaaatggcatagttgctacagaaaacagtatggcagttcctcaaaaaattaaaaatagaattaccatatgatccatcaattccacttctggctataaacccaaaagaatggaaaacaggtcttgaagaaatatttgtgtacccttgtttacagcggcagagggcattatgctaagtgaaataagctgggtataaaaagacaaatactgtgtgattctacttatgtgaggtactgaaagtagcaaaaattatagagagagagtacaatggtgatttccacggactgggggaggagagaatgggggagttattgtttaatgagtatagagtttcagcattagtagaccatttacttttaatggaattcagtatggaaagttttaattctactatcttgctatttcttttgttgttgttttgctttttgtttcctgttttactccattttctgctgctataacagaataccacagactgggtaatttatgaagaaaagaaatttatttctcacagttccagaggcccagaagtacaataacatggctttggtatctcaccagggccttcctgctgcatcataacatggtggaaggacaagtaagcatgtgagacagagagaggctgggacataaacttcatctttcatcaggatcccactcccaagataactaacccattcctgtgataacagcattaatctattcatgagggaaaaatattcataatcttatcaccccttgaaggtcctacctcttaacactgttacaatggcaattacatttcaatataagttttggagagacagtcaaatcatagcacttccttttaaatgaattgcattttttaaatgattctgttatctgcattattagcttatcagctatattgtgggcggcaagccacccaggtgccaaggcaagagaccgagggcacaaactgttccagcataataaaacatatagaataagaatagttatactagaaatagattatagatatgattatatgtgaatatcattaattattagtttgtagtattactctttattccaatattataataatttttgttttataattataacctaggaaaaaccaggccatacagagataggagctgaagggacatggtgagaagtgaccagaagacaagagtgtgagccctctgttatgcccggacagggccactagagggctccctggtctagcggacaaggccactagagggctccctgggctagcagtaacgccctcgcctgggaaggtgccgattacctagtggaccttggcctagcggtagcgtcagtacctggggaaggcacccgttacttaacagaccaggaaagggagtctccctttccctgggggagttagagaagactctgctccaccacctcttgtgaaaggcctgactgatggcaggcttgtcctcagccatccagaggcctgactgtctccctgtgatgctgtacttcagtggtcacgctcctgatccgctttcatgttccaccctgtacacctggctccaccttttagatagcagtagcagaattagtgaaagtactaaaagtctttgaaatgcatagaagaaataatggcgtaagctgtcctctctctctctccgccttggctgccaaacagggaagggcccctctggtggacacgtgactcgcatgaccttacctatcattgtagatggctcacactccttaccctgcccccttgtcttgtatccaataaataacagcatagctaggcattcggggtcactaccggtctccgcgccttggtggtagtggccccccccgggcccagctgtcctttcttctgtctctttgtgttgtgtctttatttctacatactctcatctccacacacgaggagaaaaaacccacagaccttgtagggctgggccctatactatatgactgtgtttttgtttttaagtggttgctgtaaggtttaagatgtgtacccttgacttctttctttctaccttcaataatacataccactttatgcgtattgtaagacccatacaattatatgctttcatgtacccagttttgtctctatgctggttttgttatatactttacattcgttacgaaggtcacaacacgttttaatttttttcccttaaatggtttttaaaacaatgaaacaatttttaaaagatatttttgtctttctacacatttaccatttccgtccctctctcttttctttggtaaagatcaagttcctgcatggtgtgtcttttagttcaggttagctgatgatgaagtgttttagttttggtttgtcagaatgttttttttttctttactttttaaggatattttctctgaatgtatgtttctacattgaaagattttttaaatttttcttaagtgttttaaggacatcatctcattgtcaattacctggtatactatctacagtctgtagtaatctttttttatgtaatgtatcttttctttatctacttttaagtcttttccttttttttttcttcctatttttattttaggttaaggaggtgcatgtgcaggcttcttaacatgggtaaattgtgtgtcactgaggcttggtgtatcaaagatcccatcacccatgtagtgagcatagtaccctataggtagccttccaacttatttcctcctcccacccttctcccttaagcagtccccagtgtctcttgttcccatctctgtgtccatgtgtactcagtgtttatttagctcccacttataagtgagaacatatggtatttggttttctgttcctgccttagtttgcttagaatgatggcctccagatgcatccatattgctgcaaaggacattatttcattcttatttatggctgtgtagtattctatcatgtatatctaccacattttctttatccagttctgtgtcgatggacctcttcactgattccatgtctttgctgttgtgaagagtgctgcaatgaacaaacaagtgcatgtgtcttatgtgcagtaatagtagttgaactcttagttctttgaggaatctccgaactgttttccacagtggctggactagtttacattcccagcaactgtgtatgtgtattttcctttcttggcaaccttgccagcattggttgttttttgactttttaataatagccattctgttatgagatggtatcacattgtggttttgatttacatttctctaatgattagtgataatgagcatttttttcatatgtttgttggccatttgtatgtcttcttttgagaaatgttcgttcatgtcctttgcctattctttaatgaggttgttttttgcttgctgatttgtttaaattccttatagattcgggatagtagacctttgttggatgtacagttgacaaatatgttttcccattctgtaggttttctgtgtaccctgtttatagtttcctttgctgtgcagaagctctttagtttaattgggtcccacttcttatttttgttttttgttacagttgctcttgaggacttggttgtaaattctttgccaaggctagtctcaagaagggtatttcctagggtttcttctagggtttttattgttttagatgttacattaaagtctttaattcttcttgagttaatgtttgcgtatgatgactggaaggggtccagtttcaatcttctgcatattggctagccagttatcccagcatcatttattgaataggaattcctttcctcattgtttgttattgtcagctgtgtcaaagatcaggcgtttgtagttgtatcactttatttctaggttctttatcctgttccattggtccgtgagtctgtttttgtacccagtactcattgttatatttttgtaccaataccattctgttttggttattgtagccttgtagtatagtttgaagttggacagctttgttctttttgcttaggattgtattggtgatatgggctcatttttggttccatatgaattttagaatagtttttttttctaattctgtgaagaataacattgatagtttgataggaatagtgttgaatctctaaatggctttggatagtgtgaccattttaatgatattggttcttgccaatatctgtgggcatggaacgtttccatttttttgtgttgtctctgatttctttgagcaatgttttgtaattctcattgtagagatctttcgcctctttgttaagctgtattcctaggtattttattctttttatggccattgtaaatgggtttgcattcttgatttgagtctgggtgctattggcatacagaaatgcaactgatttttatacattgattttgtatgctgaaactttactgaatttgtttatcggctctagaagccttctggtggagtctgtggggttttctagatatagaatgatatcatcagcaaagagagatagtttgacttttttttttatttggatgtcatatatttctttctcttgcataattcctctggcaaagacttctagtactatgttgaatagaagtagtgaaagtgggcatccttgtcttgtttcaattatcaaggagaatgcttcagcttttgcctgttgagtatgatgttggctatacgtttgttatagatggttattattattattattgttattattattattattaagacagaatcttgctctgtcacacaggctgaagcacaatggcagaatcatagttcaatacaaccttgaactcctgggttcaagggatcctcctgcctcagtctcctgagtagctgacactacaggtgcacaccaccaagtctggctaatttttaaattttttatagagatgaggtctttctttgttgcccaagctggtctcaaactcctagcctcaagcaatcctccttgtttggcctcccaaagtgctgtgattacagccttgagtcactgtgcccagctcgatggctcttattattttgagatatgttccttatatgtctagtttgttgagagtttttaatatgaaggaatgttgaattttattgaaggccttttctgcatctattaagatgattatgtagtttttgttgttaattctgtttatgtggtgaatcacatgtattgatttgcatatgttgaaccaacattgcatcccagggataaagaccagttgattatattgaattaactttttgatgtgctgctggattagtttgctagtattttattgaagatcttctcatctacgtgcatcaggaatactggcctgaagttttttgttgttgttgcatctttgccagattttgacatcaggatgatgctggctttgtgcaaagaagtagggagaatttcctccttcttgatatttatggaacagtttcggtaggattggtatcagttcttctttgtatgtcttaaagaatttggctgtgaatgtatctggtctaggatttttttggttaagagatttttttttattaattattcaatttcaaaacttgttattggtctggtcaggttttcactcccttcctggttcattcagtctttggagattgcttctaggaatgtatgcatttcctctagattttctagtctgtgtgcatagagatgttcatagtttctgaggatcttttgtatttctgtgggattggttgtaataccatatttgtgatttctgattgtaccgatttggatcttctctcttttttgttaatctagctagcagtctaccaattttttttttttttttttttttttttttgagacagagtctcactgtgtctcccaggctggagtagtgcagtgatgcaatctcggctcactgcagccttcaactccagagttcaagcaattcttgtgcctcagcctcccaagtagctggggttgcaagcccgtgccaccacatgtggctaattttggcatttttagtagagatggggtttcagaatgttggccagggtggtctcaaactcctgaccagaagtgatctgcccaccttgtcctcccaaagtgctgggattacaggcatgagctaccgtgcccggtccacagtctgtcaatcttagtttattctttcaaagaaccatctttttgttccattgatcttttatttggattttggcatctcattttcacttagttctctgattttagttatttcttttcttctgctagcttcagggttagtttgttctttttattcttgttcttctaggtgcaacattagattgttaatttgaggacttttttttttttttttttttgagatggagtctcactgtgtcatccaggccagagtgctgtggtgcaatcttggctcactgcaacctctgcttctggggttcaagcaattctcctgcctcagtctcctaagtagctggaactacaggcacacaccaccatgcctagctgattttttttttgtatttttagtagacagggtgtcaccatcttggccgggctggtcttgaactcctgacctcaagtgatctgactgccttggcctctcaaagagctgggattagaggcatgagccaccacacccagccaatttgagaaccttctaacttcttgatgtaggtggttaacactaaaagctttcctcttatcactgctttagcagcatctcaaagatttatgtctcttttttcattaatttcagataattttttgatttctgccttgatttcattgttcacccagaagttattcaggagtaagttttaaaatttacatgtaattgcatggttttgagagatcttgctgttgatttctatttttaatgcactgtggtccaaatgtgtgcttggtatgattttgattattttgaattaatggagacttgctctgtggccaagcatttggtcaatcttagactatgttctgtgtgcagatgagaagaatgtatattctgtggttgttgggcagaggattctgcatatgtttattaggtccaattgattgggtgttgagtttcagtccagaatttttgtgttatgtttctgcattgatgatttgtctaatgctttcagtggtatgttgaaatctctcactattattgtgtttgtctaagtcttttcataggtaaagaagaacttattttataaatctgggtgctccagtgttgggtatatacatatttaggatagctaagtcttcttattgagttgaattctttattattatgtatgtcatttctttccttgtgcttcttaattgttgttggtttaaagtctgttttagttgacagaagaatagtgacccctgctcttttttgttttctgtttgcctgaaagatgtttctccatccctttaccttgagcctctgggtatcattacttgtgagatgggtcccttggagacagcaaacagttgagtcttgcttctttatccaacttgccatcgtattccttttaagtgtgtcatttaaccagtttacattcagggtcaatattgatatgttagggtttgattttgtcatcatattgctaggtggttgttatgtagacatgattgcatagtttatagtgtcactggaatatgtgtttaagtgtgctttgtgatgacaggtatcatttcttcatttccatgtttagcactccctttaggagctcttgtaaggcaggtctggtggtaataaatccccttagcatttgcatgtctgaaaaggacttcatttttcctttgcttatgaagcttagtttggtaggatatgaaattcttggttggaatttcttttctttaaggatattgaaaataggccccactctcttttggcttgtgaggtttaagctgaaaggtgtgctgttagctgagtgggattctttttgtaaggccccttttctctagctgcctgtatgatttttttcttttgcattgaccttggagaatctgatgactatgtgtcttgggaatagtcatcttgcatagtatgtcacagaggttctttgaatttcttcagtttgcatgttgacctgtctagtgagatttggaaaagttctgtggattctgtcttcaaatatgttttccaagttgcttgttctctcttcttctctttctggaatgtcagagttgtatgtttggtctctttacataaccccatatttcttagaggttttgttcattttctaaattataatttacctcaggttgggggtgttttcacaggggaatgccatgggtgtggggtgctgcaagtgggagtgctccagtgaggagggccccacaggcagggggtattatagccagcatgatggggagtgctgcaagcgagggggccacatgcaggaaatgctcctttggtaacagctggggcactgcaggcagggagccatatgggatgggggtgcactctggtgggaagccctctggtattggtagttgggttgtcttgggtggatagctctggtgaggggcaccacaggaggggggcattctaatagggtggcagggattcagcaggtgggaagttttctgaaggggtggcagcgaggtcacaggcaaacaaattctggcaggaggctgtcagcaaaagtgctctggtggggcagtgggggctgcactgcttgcaggcatggccaggcagggactcttagaggagtgttttctttatcactgatttcaacaattcaattgtttaattatgatgtacctaacatggttggtgtgcgttttatcctgtttggttttcagtgaacttttttgatctatgagtttattgttttcatcacatctagaaaatgtgatttggccattatttcttcatatgtattttttctcttccctctttgtgttttttttttttttgtattatatcttcaattacacatacattagactgctggtaattttccaaccagtcactgaagatctattcatttttttaccctaggcttttcctttggcctctttttggtagattctattactatacctttaaattcactgatcttttcttctgtcttattttatttactcttaagcccatccaatgagttttcattgttggtggtttttttcttttatagaagttccatttggttcttcttttttttgtatttttctttactagttgaatttatgttttcttttaaatacttacacatagttttaatagctgtttaacgccctatttattagttcatcatctttgtcatctatggcccagtttctcttgactaaattttcagatggttatggtcacatttttctgtcttgacatgccttgtagtttttgcttagatgctggacattgtgatgttggtagttgttgagagcctggattttgctattttcctttaatgagtataagaattagctttggtcaacagttaatttacttttgatcagtttgaccccttcaagatgtgtattcaagctttgaaaggagtatctagcatagcctttgttccaaatattttttagctctctggatttctactccctgtcctgaatgaatgtccaaagagtttttagtctgcatggtctgatctggctggattgtctgtataccctttatgagttctgggaattgttcagcttacaactctcagttgttttttgctcagccttgttctcagcagtgactcaagggaactcctttgagggtttctggagcttctttattatgacaggttcttctttctgaaacagccccacaacttccagttgcatcagcctgcttgaactgtgagactgatattctaaactcagctccctatgacctctgtttgcatcatggctacaagcagaaagccatagctcacctgtttttttttctctttctctcagggataatagtcttgcattatctgttatcctatgtcttaaaacagttgtttcttacacattgttaagattgttagttgtttttaaagagagagtaagtattgctcatgtgcctttatcaggtcctgtaatatgcttttaattatgtaatgttattgagctatggtattatttgcaattcatgaacttttcaaggaaatgatagtataagttgaaatgatttatagctgtttgaatagtctttgtttaatgtttaaattaaggaaagggcctcttgataattttatgcatttgttgttgtgaaaaattagattaatatcttaaatataggttttaaagaaacgtggcactcatatacactttaaattattctttgctcaataaactgaatgttgtgcttgactgtcgttactcttaattatctttataaaatatacagtgtttacacaattcaggaactctggaatatgcttgaaagtgcacatggtggttgttttttttttttaactttgtcacctattttacatattttaatcataatggtttctgtagtgataacaattaaaatgcacaaaaagtttaaagttgagatgtattaagtaacaactagtaagacaaatgtatgtatatattaatacctcaaaaccaaaataaatcagaggaagagataactgaagagagtcctggagactccttatgggattttagaaagactttatcatgtgagaaattgcttttgccagaagattttctttccgttttcataatacattgttatctctctagctttatgagatttcaggaaaaaagaaaactaaaattagttggatttggaagcttatttttagttaatgaacaatttgttgaatactttttcaaaatatgaattgttttgcaaaacaaaacaggaaaatttagtataaggaaggttaaggaaattttagtataattaaaagaacctccatattatacactataacaatctgttctctttaagtaattagaaatcacccttatgttaactaataaatttggtgtctaaaaaatttatttttgaagataatttccaggtaatatttgtctgtcatagctttatgctttaaaatggaattctgttaccaaagtttgatatttttgaatttgcttcttaagaagactgttttctccttaggggaatggcctgataaatatttctgaaagctttatgtgaatatgtgttttggtaaggggaggtgaggagagtctttgcctaattattgaagttaagaataatatatttttttgtggtttgaaatacttcatggaaggcctttttttttcctatttcttataagaatctactcaaataggtagattcctgttacattataaatgctggaaatatattttttatgtataactgctcttttgtgactggattttttccgcagagcttatcaaaacacaatagaagcaatattggaactgaaggtggaccaccgccttttgtgccttttggacaggtaatgacttttgtgttggcagatgaatttaaattaggaaaaagtgtttttcattagcattcaagctgtgtttcattatgtgctgaactattaagaggttatggagttatttggaaatatgaagttcaaggaatttaataattttgaggtttttttccttcactgtagttatattgttgacgtttgcgagagctgttaacccaaagattgaagcaattaagagccatatctgaagagtaacttataactaattaaaataggatgggagagggtttttttttgagggaaattcaaaagtaagaagacaaaaatacatcataatttctcacttgttcattaaaaacattagagggggagagaaaaataaagccacacagagtgatcaaagtgctactttgaagcagccccccttctgaccagtatcttgtgacttcacttgtcttcagcatcaaattgattctcaacaatcttctccagcctgctcttgctttatccctgacaattctaagaataattcttgtggcagcttgctcttctcctgatgatgccatcaaaatttagcggttggtaatctgtcttgcatttgctctttaattttattcaagagtgctgggctaagagtagcaatgagttgtggacataacaggtaggcaacagatctgtgtttccataataaggtttatcgtgtgtgtgtgtgtccaaattttggtatttagtaaaatcatttgactgtcaccctctctaaaagccttttgtaagatatactctcacttaaataagtcatttttgcatcaaacctattttgaagcatttaaaaaataatgttgattttttttttttactgagtttggaagaagaaatagccaagataaaagaaagtgtgaagtcctatggtgtgatccatgttgatggttggtattctcccagtgtaatgaaaacctccacagggaaaacagtgtaaacattctaataacttatatttgaaaataatagtatatttgtaaaaatttacccttaaacattttggtgataatatttctcttccagagacttatgatctaattattcttaagactttgaagtgtgttttatagcttcttaggggttagagaatataataaaagctataatttcaataatattatttggttataaagttcattctgaaaaaattcttgtatagcatcttgcagccttgtacatgggctgaagataggtaatgctgactgtgtatttattggtgtcaatatgatatgtttatattactgaaatttttctgtatttgtggaacacatttctttgagatcttcccattttcctttttattaatgagttgagaaaaagttcattttatactatttttactggtaagattggactggagatcagaattgagggcttctttttaggcagtgatgcctttttttttactttatgagacaaaaatataaaaactttgaagcctgatacggggggtgggtatgtttttagagtgtggtttataagtgcagagacatctttttatatgttaatataattgtactaaccaatccacatatgtatattgtggtataatatggaaattaagctcttaattacaaaaccaaatttatgtcttattgtgcattagtcaagattgtttgaaatctaaaattatttattaccctaaaatgaaggctctcttgatccagtgtatgttttaaatatgtgccctgtttagatagccacatatttatatagcttttaattttatttactagttacgtttattgaaaagttacttttccagttttctacttttacttttaaatatatgggatagaattttatttgtgtaggcttttagctattgtaaaagatacaagatacttttgaagaagtattactttctaacgaaaacttgaatctcttttggaactactaagttgacttattcttacttgttttactagaagtgtgtatctcatgtccaagtggatagcagagaacttgatcgaagaaaaacattgcaagttacaatgcctgtcaaacctacaaatgataatgatgaatttgaaaagcaaaggacggctgctattgctgaagttgcaaagagcaaggaagtaagaaatcaaatcattacacgttttatttcttatcattatgttctatttagattatttgtgatcgttattgtcttttcatataagctaactaattcaacaaacgcttaaccttattcttcttgcatattccataactgggaatgccctgccacttcatgggatcttacatattttattcatgtgttctttttccagatctccatggtagttccagtaagttactcttgctggcaaattaccctccttttctccttccttttttttatacaatgtagtaactgaacacactttttattctggcagggagtttcctattagtagttgggctagttgccacttttttggggataatttccccttattaatagcaacttatgagaaatagcagcttctgagagatgaataaaaatcagcggatctgtcactgtgtcaggattaacatttttgtctttatactttattttatttagtgtatagtaaaaaataattttatctttacattatatgtctatttacacacacacaaatcctcctttttaactgacaaataattacacatatatatgaggtacatgtgatattttgatacgtgtatacaatatgtaatgatgaaatcagggtaattatatctgtcacctcaaacatttaccatctttgtgttgagaacattcaaaactctcatctagctattttgaaatatacaataaattattgttaattataatcaccctagtgttttattgaacactagaacttattcctcctaactgtaatttaattcccattaatcaacctctcccactgtcccttaacgttcacccttcccagcctctagtaattactatgctgctcttctatgagacaacttttttatctctcacatatgagagagaatatgcagtatttgtctttctgtggttggattatgtcacttaatgtaatgtccttcaggcttatccatgttgctgagaatggcaggatttctttcttttatataactgaataataatccattatgtgtagacagtcagctctccatatttgtggattcaactcttcctaactatggattcaaccaacagtggatcaaaaatattttggtgggggcggggaaggatggttgcatctgtactaaatgtgtacaaactttttttttgtcttgtgattatttcctaatgatatggtatagcagctatttatataacatttataccatataaggaattataagtaatctagagatgatttaaatatacaagaatggccaggtgcagtggctcatgcctgtaaccccagcactgtgggaggctgaggcaggtgtatcacctgagcctgaccaacctagcaaaaccctgtctccactaaaattataaaattagctgggtatgctggtgcatgcctgtaatcccagctactcaagaggcagaggcaagagaatcacttgaactcggaaggcggaggttgcagtgagccaagattgcaccattgcgctccagcctgggcaataagagtgaaactccatctcaaaaaataaaaattaaaaaaaaaagtatgcaagaggatgtgcataggttgtatgcaaatgctatatcattttatgtaagcgacttgagcatgtttttgaaatctgctgggagtgggagagtggtgggagtcctagaaccaatccctcacggataccaaaggatgactgtataccacgttttctttatcccttcatctgatggtgggcacttaggttgatttcataacttggctattgtgactagtgctgcagtaaatatgggagatatctctttgacccactgctttcctttcctttggataaatacccagtagtgggattgctcaatcatatgctagttctatttttagtttttttgagcaacctccatattgttttctgtaatggctgcactaatttacattcccaccaacagtacataagagttcttctttcttcacatcctcaccagtatttgttatttttttgtctttttgattatagcagttttaactgggttgaaatgagataatatctcattttgttttgatttgcatttccctgatgatgttactgagacacccagtctagatcctgctgctcactgcacagtaagccaatcactgagacaatgagtgttgccaggaaagaaggctttatttgggtgctacagctgaagagatgggtcgtcagtctcaaatccatctccctgatgggctaaaattaggggtttatatagcagagaagaaatctatgtgcaggaaaataggaactaaggaggggtaaggaagcaattctgatgaatgaggggtgtggcatctcattgtctggatgtggtgatctggttaattttagttctttgatactttttgaaaggcctgagtgtcatttcctgaggaaagaactcagataaagataaatcaaatgaaagtttcagattttaagatcagaagggtcaatttctgtttatacaaaaaaactgtctatgggactattgggctgatttcaatggtaaatgatgttgacattttttcatatacctgttgaccatttgtatggtcttttgaaaaatgatattcaaatcatttgcccatttttaaattggattgtttgggtttttttgtttttttttatttttgacagagtcttgctctgttgcccagggtggagtgcagtggcgcgatcttggctcactgtaacctctgcctcccaggttcaagctattctccagcctcagcctcccaggtagctgggaccacaggtgtgcaccaccgtgtctggctaattctttttttgtatttttagtagagacagggtttcaccatgttggccaggctggtcttgaactcctgacctcaggtgatccgctcactttggccttccaaagtgctgggattacacaggcgtgagctaccatgcctggccgggtttattttttgttttgtttagttttgttttgcttttgaattgttatgttccttatatattctagatattaactccttgtcagatggatagtttgcaattattttccttcattctgtaggttgtctcttcactctgttgattgaattcttagctatgcagaagctttttagtttgatataatctcgtttgtctatttttacttgtgtgcctgtgtttttgaggtcttatccaaaaaatctttgcccagaccaacatcctgaacaacaaacccctctctcttatattattgatagccaaagttctctttttattattttgaattatttgcttatttgtaataggtgtttttcctagttatttattgatttcttttagactgataagaaattttaggtcataaattagttgctacatagacatttcttaaccagtgagattgaaattgtttcctttattcaaaacctgtaatgaagcttagcttacaactgctttcctatttaattttgaagtgtaagtagtagtgttcttgaattttggttgttcttcccgcaatgtctttctgttgtcagtctagtaaaggggccagaagcacaggctctggaatcacaggctggaagcatatcctactgacacctttggatggttactcagcttttttgtatcccctgttttttatttttttcatctgtgaaactcggagataataatggtacctacttcatatgtgagaattaaaacatttagagctaatactactgctacttggcacaaatcataacactcttgctcaaagctctcagtaaacacgactattgctattctttactttttcctctacaaggcatacttttaaaaaaacagttttaccatttcttaaattaatacattttatataatttgcatgaaatatatttatttttttccagaaatacataaaattatggagtttcagaagatattgagaatatattttttaaaatgattatagaaagatgttcttttgatttacatttatctcaaatgaacttttctaccaaggattttgttggatgcagttacagctgtctatttattggagcatagttaacctattataatgtgcttctttttgttgtcacaattgatattatattttcccatgaatatttgataattaaagcatcttagtttttttttttttttttttttttacagcagacatcaaaacatctcaatttatatatgagagaatttatggaggcttaaaactaacaaacaaacttgggacttgtgcaaggttatccagtgataattgtaggactcaatcgatgtaactcagaagatctgaatcatagtaatataagcatactaaataagcagattgcaattttaaatataatagtctgtttagtcctcaagatagtgagagctgagccaagacttgaaggaggtacgagaattaactacttggttatctgagcaagagtattccaggcagaaggaaaagccatggcaaaggctctaaagcaggagcacagagaaacagcggagtggccagtggaagcagagagaacagagggacaagtagtagaagataaagtcaagagagataatagaggttaccttatgtagggccctgtaaactattgtaaagacattgtacttcattcaaggagaaatgggagcctttggaatgttttgagcacagcaataacctcagctgacctatattctgaaagagtaattgtggctgctgtgttcagacttggttgcagagaaggagaattggaaaccaacaagtagagaattattgaagtaatctaggatttaaaaaaaaatgatgatgccttggacaaacatagcagttgtgtaggtagtgcagagtggtcagattctggaattttgaaggagccattagggttactgagattggatatagggtacaagagaagatgtggtatcaagaatgaatctagccaggcgcagtggctcacgcctgtaatcccagcactttgggaggctgaggtgggcagatcacctgaggtcgggagtttgagaccagcctgaccaacatggagaaaccccgtctctactaaaaatacaaaattagctgggcgtggtggcgcatgcctataatcccagctactcgggagcctgaggcaggagaatcgcttgaacccaggcagaggttgtggtgagtcaagattgtgctattgcactccagcctgggcaacaagagcaaaactccatctcaaaaaaaaaaaaaaaaaaagaagaagaatgaatctaagagttttacccagagaaattggcaggttagagttgcttgccttgaaatgaagaagtgtggagtggagcaggtgtgaggggaggaggatctggtgctccattttgaacatgtgaatattgaggtacttatcagacatgcatgtagtaataatgtttaatagacagtaagactgaagagtgagctttataatagatacatgcacttgagagttgtagacatatggatggtattgaaaattatgaggccaaatgagatcaccaaaggaatgagtgttgatagagaacagaaaaagctaataatgaaccctgtaacacttcaatttgaacttagagcctagatggcagaagtggaaccagccaaggtgtgaccagtaacaggataaaaacagacaatgcagaaaatacattatggagaaggaagtgttaaacttatcaaaggcaattgaaaagttacataagatgaggacttagaattaatatagaatcgaggaagttgtttattccatcctcattcctcttaacatgcatatggttggtggtatgataaaccatatggggttaagataaagtatgaccatgcatttaccaacagtgtgtgggttgatgtggtcaaaatctatgtgagttctttaatgattatttcaggttttttttttttttaataaggaagtaagcatggtcaacagtgacatgagaaggaggtttgagaagtgaggagaatgtgtaaaatagtggtctagaagattaggtatatgtgtgtgctagggaaatatggtaagattgctagacagcattaaggcccacttgagtttcacagtcatgatgatctcatggatgcctaattcatataatatgagcaaaaagatgtggctcataaagggcaacaccagttaccttatgggtaatatttaggttgtgatggttctagatatttatatgagtgagtagtaactattttagagcagtaaaaagcaactccgaaaatgctgcttatcctattccttaatccatacaatggaaagaaaattataagtaaatgcatccagaagatgggactatttcactggcaccaaaggaaaaaacacttttggaattaggggatgtaaattttggaaatatatttaatttggagcaggtgagattccagacttttcaggtaattttgttctagtatattaaccaaaatagtaaataccatctgttattgagtgtttgccatgtgccagctactgagataatcacttcatatcaatgatgtcatttaattctccaaatatcccaatgaggtaggttttctaatcccagttttaaagatgaaaaacctgaggctctgtggaaggtggaagttaagtgacttgcctgaaggctaaagatagtggctgggccaagataagtcccagccttgtctagttacaaagcctatgtgcttaactgtgctaccttgcctcctagtctaataaattttgtatcacattaataaatacgtttttctagttatacaagtaatgactatgaaggcatttcaaatatttttttttttgctgggattccataaacccaaaattgaatgaatctagtaatgaatccttggtaattgaagatgtggttttaattttgatttgagttaaatgtaaatactgtagtttatcagctacctaatagagatgcttaatatgttatccattagtgctcatccaacattttaaaaaagttttcatgtatacttctttgtattttcttccgtttcaaataattttctttcttttctttttttttttttttttttgagacggagtctcgctgtatctcccaggttggagtgcagtggcgcgatctcggctcactgcaagctccgcctcccaggttcatgccattctcctgcctcagcctcccaagtagctgggactacaggcgcccgccaacatgcccggctaattttttgtatttttagtagaaacggggtttcaccgtgttagccaagatggtctcgatctcctgacctcgtgatccacccgtctcggcctcccaaagtgctaggattacaggcgtgagccaccgcgcccggcctcaaataattttctaatgttattgtattatatataatttatatgtaagatgtttccttactgtaatcattttaaaacatattttaaaatattggtcattgtctctaataaaaattgttttagcttcttcttttattatatccatgagaactataaaaatatttgccaggcatggtggctcatgcctgtaacttcagcactttgggagggcaaggtggatagatcatctcaggtcaggagttcgagaccagcctggccaacatggtgaaaccccatctctactaaaaatacaaaaattagccgggtggtagtggcacatacctgtaatcccagctactgaggaggctgagacaggataatcacttgagcctgggaggtggaggttgtagtgagctgagattgcaccactgcactccagtctaggtgacagaaagaccctgtctcaaaaaacaaaaacaaaatctataaaaatattgtttaaccaaatgtttcatactgtacaggtaacaactggcgatgcttttcagttatgaagttgtgtctttcaaaaccaatattatttatgtcctaatcttttcctaatagttttgaaaaacaaatataagataaaatcaaattttcaaatttaatgtcacatatatatttattcaaaaaagacaggccaaataagaaatacagacttaaaagcttttatatgcagtcggtaagaaatgacatattacatgattaatgaaaataataaattagtaatgagagtttcaatctaatgttcaaacttgtttactaagattatgcaatcataatactgaactatggacataattttaatgattcaagataaccttgcctggtagctggatttagaacccaactctcaaggcagtagtcaagtattttaccctaaaatcattttaacaagtagtcttcataatgcttgtagtattttcttctctatagttgtacactcattttcatgacttcccttttattcacaaatcatgtaattatttttattgcctggcctggatttgtgaataagagattgtgactagtagatatttttgctattcaaaaggagtaagttaatattttattttttcatgtaaaacataattaggaaacttaattacttcagttgtttttagtcatagcttagtttttagaactatttttaaatgctgtctacatacctctcttttatctttctcttatgtaaagaccaagacatttggaggaggtggtggtggtgctagaagtaatctcaatatgaatgctgctggtaaccgaaatagggaagttttacagaaagaaaagtcaaccaaatcagagggaaaacatgaaggtgtctatagagaactggtaaggctaaagaactaaccacaaatttaaagtgttatttcttaaaatgattcttttattctttcttaccaccaccactggctttgtgcaatgtattatggatagatgttataactcttgaaggctttcattaaggattacaattaaatcattaaaaatttggattgtttgaaaaataatttacttaaaacttctatctcacttaaattactaatgtcctaataatatattttggaatggattgataaaaagccatcaaaagatgatgcatcaaaaacatacatttttctgtgcttccccaccttccccacatcttttgtcaaattttgtctaaagtgattttgttttgttttctactgctctttgggaagaatattgtgaaacaagcatatgtattatgtggacccaattgcaaaatattcttgaatttttaagataaatgagtggagtcaaacatatttctggcatgctgtagtgttctcagatctaaggatgtttgcaaaaattcattttcctctccctttagaggttgaatgactttggttgatttttgtctttagggtacagaatatcccaaaacagcttaaaccatggaggtttattatttcatataacaagaagttcagaagtagatggttacaagtgttggtaaattcagcagtataacaatattagggcatttgtgggtatttccatgatttcttggctttctccttagtgttatgtaactgctcaatggattcaccttacccactgcctaaataaagctgatttatcaagacaggggaattgcaatagagaaagagtaattcatgcagagccagctatcgtgagagactggagttttattatactcaaatccatctcagtgatcattcaggaatcagaggtatttttttttttttgagatggcatttcactcttgttgcccaggctggagtgcaatggctcaatcttggctcactgcagcctctgcctcctgggttcaagtgattctcctctctcagcctcttgagtagctgggattataggcacctgccaccacacccagctaattttttgcatttttagtagagacagggtttcactatattagtgaaactggtctcgaactcctgacctcagatgatccacccgcttcttcggcctcccaaggtgctgggattacaggcgtgagccaccatgcccggtgggataaaagtttttaaggacaagttggtgggtgggggaagccagtgagccaagaacactgatcttaggagcagtttgtggagggtcagaatcttgtagcctccagctgcataactcttaaaccatagtttctaatcttgtggccgtgatggctaatatggagtgtcaacttgattggattgaagaatacaaagtattgatcctgagtgtgtctgtgagggtgttgccaaaggagattaacatttgagtcagtgacttgggaaaggcagacccacccttaatctgggtgagcacaatctagtcacctgccagtatggctacaatataaacaggtagaaaaatgtgaaaagacagactggcctaggctcccagcctacatctttatcctgtgctggatgcttcctaacctcaaacatcagactccaagttcttcagttttggaacttggactggctctccttgctccgtagcctgcagatggtctattgtgggaccttgtgagttaatacttaacaaactcccatatatatatatatatatatatatatatcctctaaagttttgtccctctaaagaaccctaatacagattttggtaccaggagtggttctagaggaacaaaatattaaggatgtatttgtttcgttagatttgggatttttggagttggctgcttaatatgattagatccaaaactgctatggactctacttctaatagtgtggagaacactgatagtccttcacatgaactttttagagagttatgcaaaataaatgcatttactgtttttgattcatcactcatgagaggcaaggagtttagtgactctatacataatacctttgaccatatgtggagaaccaaggaacataatgaagctggttggttgcttctaagtttggtggacaaagtgatgaaagaaaatgatgaactcaggcatcctatctcctggcttcagaagcagatactgagcctcaaatctgctaagattgccctgagtaagagtcttattgttactggagggtccttgttcttagagctcccaagatggtggtgggctgcttccaagatggcagcaagctgcttgttctctgacctggcattcttggcctcatggattctaaggaatggaaccttgggccatgcagtgttatagctctgttagaagcggtgggtcacggaagaaaaccgtggaacccagcaactagtgttcagctcaattaggacgaaccggggacttagccatacaggaacaatggcaagtctttagcctgattgggagcggcagctggcaccccactggatcagaaacacagtggacaccctgctggatccggaagggtggaagtcaacggcgggtctgggacggcggtgaacagcagtggtggatggcaagcgaaagctcagcttgagtcttaacaaacatggaccagaagagtgtgcagttgcaagatttaatagagtgaaaacagagctcccataaaatgggaggggacccaaagggggttgtcattgccagctcgaatgcctgggtttagatcccgatcattgtccctccccctgtgctctcaggtgatagatgattggctatttcttctgtttttgcctaattagcattttagtgagctctctttactacctgattggtcgggtgtgaactaagctccgtgtttaaaggtgggtgcagtcaccttccccagctaggcttaggaattcttagtcggcctaggaaatccagctagtcctgtctttcattatctcctgtggagaaaaagctgaaattgtggaaaaacagacacaagctcttatcatgtgagtggctgacatgaaatgaaaggtgcatgcacagtcttgccaggtgtctacttttaaagtgagggcattggttggaaaagagtaggaccttgtagcttggaatggggatgtgtgggtgggccctgatgaagctggggacactgagtttgtaaactctgatgaatttttttttgctagaagaaacagcttccccatccccagtaatggcttgagttttctaatttatataaacagaaatctgaagagcagacatgggaatgtatattaagggtgtgggataatggtggaagcaacattgagttggatcaggctgaatttattgattcaggcctgctaagtaggcctgaatctgcatttaatattgcagctcggggggttaaaaaaaaaggctaatagtttatttgcttggttagctgaaatgtggattaaaagatggcccactgtgagcaagctggaaatgcctgatctcccttggcttaatgtagaggaagggatacaatggcttagggagattgggatggtggagtggattagtctctttagacctactcattccagctgggagggtccagaagatatacccttgagcaacgccttgcaaaatagatttgtgagggcagcacaggcatctttgaagatgccctgtaattgctcttctctgtatgtcagagctaacagtgtgaactgcagtcactcaactacaaaatttaactgcagtgggaataattggatcccaaggtggcaggggccaagtggtggcactcaaccatcaaaggcaaggttaagcgtggctactgtaatggacggtagaagcaaaacggcaatcagaatattctgacttgtgtagagctctggcattggctaattaatcatggtgttcctagatgtgaaattgataggaagcctactgcattcctacataatttagacaagcagaaagcttctaggtctaatggacaaaagactaatttgaattatgaaagtagagatttgtggcccctcaatcaattttcagccagtttacagacccagaatcccttgaatgaaggggaggctgggtccccttgaggaaagaccccaccgacagtttatgcagtgagtctttcttctatccttccccaaggagacctccggccttttaccagggtaactgtgcattggggaaagagaaatgatcaaacgttttggggactactggaaactggctcagctgatgttgattccaggggacccaaaatgtcactgtggtcctccagttaaagtaggggcttatggaggtcaggaaattaaaggagttttagctcaggtccaaattacagtgggtccagtgggtacgcggactcatcctgtggtcatttccccagtgccagaatgcataattggaatagacatacttagcagctggcagaaccctcacactggctccctgactggtagggtgagggtgattatggtggaaaaggccaaatggaagccattagagctgcctctacctagaaaaatagtaaatcaaaaacaatattgcatccctggagggattgcagagattagtgccaccatcaaggacctgaaagacacaggggtgatgattcccaccacatccccattcaactctcccatttggcctgtgcagaagacagatggatcttggagaattacagtggattatcaagtggtgactccaattgcagctgctgtaccagatgtggtttcattgcttgagcaaattaacacatctcctggtacctggtatgtagtcattgacttggcaaatgcctttttctccattctggtccataaggtccacccgaagcaatttgccttcagctggcaaggccagaaatatacctttactgtccttcctcaggggtatatcaactctctggctttgtgtcataattgtattcagagagaacttgatcacttttcacttctgcaagatatcacactggtctcttacagtgatgacatatgctgattggatccagtaagcacgaagtagcaaacacagtgggcttattggtgagatatttgcatgccagaggatgggaaataaatctgactaaaattcaggaatgttctgcctcaggaaaatttctaggggtccagtggtgtggggcgtgttgagatattcgttctaaggtgaaggataagttgctgcatttataaccaagaaagaggcacaatgcctagtgggcctatttggattttggaggcaacacattactcatttggatgtgttactctggcggatttatcaagtgacccaaaaggctgccagttttgagtggggtccagaacaggagaaggctctgcaacaggtccaggctgctgtgcaagctgctctgccacttgggccatatgacccagcagatccaatggtgcttgaggtgtcagtggcacagatgctagttggagcctttcgcaggccgccataggtgaatcacagcagaagcctctaggattttggagcaaggccctgccatcttctgtggataactgctctttttttgagagacggctcttggcctgttactgggttttggtggaaaccgaacatttgactatgggtcatcaagtcaccatgcaacctgaactgcctatcatgaactgggtgctttctgacctatctcaccataaaatggctcatgcacagcagcattccattatcaaatggaagttgtatatgtgattgggcttgagcaggtcctgaaggcacaagtaagttacatgaggaagtggctcaaatgtccatggtctccaatcctgccaccctgccttgtctccccaagtctgcaccagtggcctcatggggagtccctatgatcagttgacagaggaagagaagactggggcctggttcacagagggttctgcacaatatgcaggcaccacccaaaagtggacagctacagcctacagcccctttctaagacatttctgaaggatagcagtgaagggtaatcttcccagtgggcagaacttcaagcagtgcacctagttgtgcactttgcatttaaggagaaatggcgaaatgtgcgattatatactgatttatgggctgtagccaatggtttggctggattatcagggacttggaagaagcatgattggaaaattggtgacaaagaaatttgggaaagaggtatgttgatggaccactctgagtggtcaaaaactgtgaagatgtttgtatcccatgtgagtgctaatcaatgggtgacctcagcagaggaggattttagtaatcaagtggataggatgacccattctgtggacaccacctcaacctctgttccagccacacctattatattccaatgtgcccatgaacaaagtggccatggtgggagggagggaggttacgcttgggctcagcaacatggaactccactcaccaaggctgacctggctatggccagtgactattccttggggtgatcagccagctacctgttggcacgttgattatattgcacattttccatcatggaaagggcagaggtttgttctcactggaatagccactcactatctgcctaagtaatttcttcttaactcctgtatcattccccccgctggagtggtaactctaactgctgttagggggtgttggacgatgactcttttggctacttcctgcttaagagaggcattgtgtggggaacaacagctagggctcctcctaggatcaatctaaaggtcctcagcagaaagatgtgtccatgcattgttctgtctacagcaccatttggagtttgattgctgtcagccattccgatgggttgtaatactggtttgcctccaccagatgttgctgaaacactaatataaatggaacattccttttgggataagtagcattggatttggatggctagagtaacttcagtgttaaccctggctaaatcttttctgcaattattaatccctccatgacttacacagaccatctaagacatgcttaaactttcctacttgtcctaaacatccttctttttaaacaaccaaagattctttttaggacaagtgtttaccatccataaaatcattttatgacttccccaaaccatccacaaaatgcttaaaccttctgacttgtcctgaacatccctcttttaaacaaccaactattctctttaggacaagtacttactatacaagatcctttcttatataaaatctctttcctttataaccttatttgcatagccagggtgtgacatgttaccaaacccaataaagttctagcagactcagtgatagtaaaatttttatgcttcttttttgttggtaactattattcctgctatcaggataataattacacaaaatactatagcaatggaaactctctgtctgatattccagttagaaggtggtaacgtgtataaccctactgcaaatagtagagtgagtatagcagttcccgcaagtgttgtgtagtacataatttccatctaaaattttacttgctaagatacagaatttccttttgtggttctatgaagatccttagttttatcttcccaaatgaacctctgggttatgggcaccctactcactttcattacctgacagaatttgcaggataattgtccagaactaggatattgatccagatttttacattacccatgcctttttgtttcttccaagctgcaagagatcaccacttgattcacaggaataagcagggttagtctaaaatgtcaacaaaataaactaaaaaacaattaatgagactggaatttaatgacaaatgtataagctttggatcataatttttctctctctagtccttatttttggtaaaaacaaattatgataggactgtgttttttgtagaataaactttagtcttatacttggcctgattatttgcataaagtgcagcaagaatgattatttctatataggccttttggattgtctttgatggaactctgttccacaaggaacctcagataagatcttttaaagctgagctcagccatgggtttgtatcttcaaatacctgtgagttgggtgatcttctcctctaaaggccccaggataaaccaggagctcctggtcctgttagaaagtgacattctttactgaccacaggtcaggaaccttgtacaggattatatatataggtatgaggccagttctctccatgggaattttattgtctctacaagttgagattgactccttaaagggaagcatatccttccagtcaaagccttgataaaataaccggtttttctaattgtgtcctgttgcaaaaggaaaatggattcttattgaactgatgcaaactactatattgtgataacttaagagtactcagagatagttttgaaattctagaggaaccaggcagagagaaacaaacatgctccaaactttgttcacagaataccttattcaattattaaaggctgtaaatcgttcaaaataagtttccttgactctgaaagacaaacaaggatcatcaatattctaagaaaaataaaaaaggttcctttagctttctgagtttagtccatttagttaacttctgttttgcttgatacttgtgaacatttcagttcttcatgagtcctgtacctttttctctattccagtgttacaatcttcaaagctattagaatcctgcatttgagagcacctgttaaagttgtatagcttgattgtaacccatcttttgagaaggaacagagcaagacaagaattgtctgcaaatgacatttccagggtagttacagttaaaaacatgactgataaagtttagttatctgtggtttacaataacttgacaaccttaattatgattaataggatataattagacattcgacttttagaaattccatacaatattggaacatatattagtattattcaccaaaatataacttaaagaagattgcacatcatttcggaaatccaatgtgactaaacatgccaaacaatcctgtttatctcttctctggatgtttcaggggccctctgaaccatccagaaagcaaggtatccggaaagaaaattttgaaacttgaagtttgattttgggaaggctgctaaatgttggaggacttaaaacacttgatgttatgaaatagaattccatattgctacaaattatttattttgccaaaatgataactcaaaaggcaaaagcctttcattagcctttactattacatgaaaatcctgttgaaagccaaattgtacccttgcatcagtttattaatgttaaccccaattggtttaaatgaaaccttatagacgattccatctaatcttaaccagtttgaccataaatgaaatctttacaaaccttttataatgctttttgctaaagggcagattggcatcagaagaaaaccttgctgtgcttttatttcaatgctcaatttatgaaaagatcatatacttttttgaatttagttaatgtttgtgtgtttttgcaagattaattttaaaaattttagaattttttaaatctttttataatttgcttaattacctctaggtttatcttatcaaatctgagataatcactcatccctgggcaaaatttacattttcatgctttctgataatcttttactaaaaaaagttactgtttttatacaccttgcttgtaaaactgtttagtgatctcaaatacatgttgcaatgtaaactcttagcaacttttacttttggtgaaaaacctggttagtaagcagttttaattgtgtaccaggtatggagcctaggacccagacagaagtgcagataaggtctgactttccagcatctaactccatatgtcccaggacttgcctgtctgtaaagcaggcagtttacaaccttaaaacatttagcaaacctagtatctgacttgtatgatttagaccacatatttgcattttgatgacacttgcattttaccatccttaagacattttgtttcttaaatattaaagtcacatgaactaaaaagcattacagcttttatctttccttaaaaaaatatttgattcggtggtggctggcaagatggctgaataggaacagctccggcctgcagctcctagcgagactaaggcagaaggcaggtgatttctgcattttcaactgaggtacctggctcatctcattggaactggttagacagtgtgtgcagcccatggagggcgagcagaagcagagtggggcgttgcctcacctgggaagcacaaggggtcggggaactgtctcccatagccaagataagccatgaggtattgtgccatgaggaatagtggacttcggcccagatactatgcttttctcacagtcttcacaacctgcacaccaggagattcccttgggtgctcatgccaccaggaccctgggtttccagcacaaaactgatggccttttgggcagacactaacctagctgcaggagttattttttcataccccagtgacgcctggaatgccagtgagacagaactgttcactctgctggaaagggggctgaagccagggcgccaagtagtctagctcagcggatcccacccccacagagcccaacaagctaagatccactggcttgaaattctcgctgccagcaccacagtctgaagttgacctgggatgcttgagcttggttggggagaggggtgtctgccattactaagccttagtaggcagttttcccctcacagtgtaaacaaagccaccaggaagttctcactgggcagagtccaccgcagcttggcaaatctgctgtagccagactgcgtctctggattcttcctctctggggagggcatttgtcaaagaaaggcagatgcctcagccaggggattatagataaaactcccatgtccctgggacagagcaactgggggaaggggcggctgtgggcacagcttcagcagacataaacattcctgcctgccggctctgaagcaagcagcggatctctcagcacagtgcttcttaactaaaggagcatgttctaacccaatgcaaggaagctaagaaacttgaaaaaaggttagaggaattgctaactggaataactagtttagagaagaacataaatgacccgatggaattgaaaaacatagcacgagaactttgtgaagcatacacaagtatcaatagccgaattgataaagtggaagaaaggatatcagagattgaagatcaacttaatgaaataaagtggaaagacaagattagagaaaaaagaatgaaaaggaacaatgaaagcctccaagaaatatgggactatgtgaaaagaccaaacctacatttgattggtgtacctgaaagtgacaggaagaatggaaccaagttggaaaacacacttcaggatattgtccggaagaacttccccaacctagcaagacaggccaacattcaaattcagaaaatacagagaacaccacaaaaatactccttgagaagagcaaccccaagacacataatcatcagattcaccaaggttgaaatgaaggaaaaaatattaagggaagccagagagaaaggtcaggttaccctcaaagggaaacccatcagactaatggcacatctctctgcagaaaccctacaagccagaagagtggtggccactattcaacattcttaaagaagagttttctttaagaatttcatatctagattttcataccagccaaactaagcttcaaaagcaaaggagaaataaaatcctttacagacaagaaaatgctgagagattttatcaccaccaggcctgccttacaagagttcctgaaggaagcactatatatggaaaggagcaaccggtactaaccactgcaaaaacataccaaattgtaaagaacattgacactggccgagtgcagtggctcatgcctgtaatcccagcacttttggaggccagggtgggcggatcgcaaggtcaggattgagtttgaggagtttgagaccagcctggctaacatggtgaaagcccatctctactaaaaatacaaaaactagctgggcgttgtggtgcatgcctataatcccagctacttgagaggctgaggcaggataatcactggaacctgggaggcggagtttgcagtgagctgagattgcactacggcactccagcctgggtgacagaatgaaacaaacaaacaaaaaaaagaacatcgacactatgaagaaactgcatcagctaaagggcaaaataaccagctagcatcataatgacatgatcacattcacacataacaatattagccttaaatgtaaatgggctaaatgtccctattaaaaggcacagactggcaaattggataaagagtcaagacccatcagtgtgctgtattcaggagacccatctcacgtgcaaagacacacataggctcaaaatatggggatggaggaatatttaccaagcaaatggcaagcaaaaaaaatgcaggggttgcaatcctagtgtctgatgaaacaggctttaaactaacaaagatcaaaagagacaagggcattacataatggtaaaaggatcaatgcaagaagagctaactatcccaaatatatatgcacccaatacaggagcacccagattcataaagcaagttcttagagacctacaaagagatcttagactcccacacaataatagtgggagactttaacaccccactgtcaatatgaggtcatcgagacagaaaattaacaaggatattcaggacttgaactcagctctggaccaagcggacctaatagacatctacagaactctccacctctaatcaagagcatatacatttttctcagcactatgtcatactttaaaattgaccacataattggaagtaaaacactcctcagcaaatgcaaaagaacgaaaataataacagtctgtcagaccacagtgcaatgaaattaaaactcaggattaagaaactcactcagaatggcacaaataggtggaaactgaacaaccttctcctgaatgactactgggtaaataaaaaaattaaggcaaaagtaaataagttctttgaaaccaatgagaacaaagacaaaaaataccagaatctctgggacacatttaaagcaatttgtagagggaaagactggcacaagacaaggatgccctctctcaccactcctattcaacatagtattggatgttctggccagggcattcaggcaacagaaagaaataaagagtattcacataggaagagaggaagtcaaattgtctgtgtttgcagatgacatgattgtatatttagaaaacctcattgtctcagttcaaaatctccttaagctgataagcaactttagcaaactctcaggatacaaagccaatgtgcaaaaatcacaagcattcctatacactggtcatatacaaacagagagccaaatcatgagtgaactgccattcacaattgctacaaagagaatacctaggaatacaacttacaagggatgtgaaggacctcttcaaggagaactagaaaccattgctcaaggaaataagagaggatacaaacgaatggaaaaatattccatgctcacggataggaagaatcaatatcatgaaaatggccatactgcccaaagtaatgtatagattcagtgctatccccatcaagctaccattggttttcttcacagaattagaaaaaactactttaaatttcagatgggaccaaaaaggagcccatgtagcaaagacaatcctaagcaaaaagaacaaagctggaggcatcatgctacgtgacttcaaactatactaaaaggctacagtaacccaaacagcatgatattggtaccaaaacaaatatatagaccaatggaacagaacagacgcctcataaataacaccacacatctgcaaccatatgatctttgacaaacctgacaaaaacaagcaatggggaaaggatttcctatttaataaattttgctgggaaaactggctagccatatgcagaaaactgaaactggatcccttccttacaccttgtacaaaaattaactcaagatggattaaagacttaaatgtaagacctaaaaccataaaaatcctagaagaaaacctaggcaataccattcaggacataggcatgggcaatatatttcttgtgaaaaaagtttagaaaagtcactaagcaaactgatcactgtaaccttcatcaagttaacagtggtgatccttggggaggaggcacaatctgactttcagttacctaattacaggattcaaaatgtccacttcccaacaaaaaattacaaagcctacaaaaggcaggaaaatttagcccattcacaagaaaaagagaaatccatagaaaccacacctcaaatagcccatgcattggacttaactagagaaagactttaaatggactgtcttatatatgctcaaaggtctgagagaaaccattgacaaagaactaaagaaatcaggaaaacaatgtataaacatgttaactattagatgtataaaagttaaagttttgtttttctcagctggctttggttcaagaaatttcttcgtaggatatgtttatactccttaagtggttcttgaattctattcaggtctagatttttaaaagagatttggattctggcatttgtaaagtagattttcttattggggtatagctgtcaaagcatcatagatagtattgctaatgaatatagctagaatactcaagtactagtttaaaaaaaaaagctcctggggggtatcattttgttagcttcaatagtttacatttttggagaggtgctgtatgaattacatttcccttctagtatggagaagtatcaaaaaatttccattttttaccatgaaaaattttcattaagtagttttctcctcactgtctatattattttcaaaggccatactctaacatatcataaaatttattttttgtgtgttgcttttgcagtgttacttgtgaggtcagagaatactcaaggcacaaccccacatatcatacagattcttccttgcctcttgtaaaaaatcagcaagagaatgttgtattagaatgacatttttacataagtatgggatgtaatttttagttaaaagacagtaagtagttaaaagtttatgccttgccttatctgtgggctatcagccagcttttctctttattccttccaggttgatgagaaagctctgaagcacataacggaaatgggcttcagtaaggaagcatcgaggcaagctcttatggataatggcaacaacttagaagcagcactgaacgtacttcttacaagcaataaacagaaacctgttatgggtcctcctctgagaggtataatttattaagcagtgtgccagatagtattgtttgcttttcagagtaatatatgttattgacagaggctgttatttctgtgagggctgtaattttgtttaacattatggtaagtggaaggaacaccagtttgggaaccatagagacatttgtagtctcagtctcattgtcttcatctttgtacaaaatggatctaacaacaacaacaaaacaaaaacaaaatgggtctaacaataccttatttaacaaggttgttatgagtaatagagaaaatatgtgactggttctattatttctagaactctgccacctcagtaaatgactaagcttttaaaaattaacaaaaatattacatttacttggtgttattctttaatcattgcatggtcaagtttcttatgtggtcccagtcctatattcttttaaaaatatctgtggttaaagaataaattataatttttccttaaaagttagtttatatgaacaaattcggacttctgaatagatcatttatttagaggattaaatatgctacttaatataattacttaaaaacctaaaaaaattacttaaaagatgtagactatacaaaaaatatgaaaagaaattaaaatccttatttaaaattattgttggttatatattagtatatattctctttttgtttttgcatatacagtacatatttcttgcttttgcatctaaaggtagaggaaaaggcagggggcgaataagatctgaagatgaagaggacctgggaaatgcaaggccatcagcaccaagcacattatttgatttcttggaatctaaaatgggaactttgaatgtggaaggtaagctaatttaaagttgattcctttttttttctttcttttctttctttttttttttttttagcgtatttctttttaaaagaccaaactttatttagaattgtagtgtaaaacaactataatatgaacgtatatcctgagtgtttgtttataaatttacttaatctgaaaacataatggcagcttattttgccccctaactgggattagtaatctcaccaaaccagttttcccaaatttgctcatatctagatgacagatataactgtgtaaacaggttgttgtgttggaaatttattataatcttatataacttattttgcttgtgaaattgatatatctcttctttctccccatattacatagtttgaaaatgttcacacaatgagtgaaaatgctttcacaatgtggtatattttttatatactttagtgattactatattgaaaagagaagtaagtatggtaaatatgcagcctttttctaagcacataatatagtaaatattttctaaaatggtaagttttcaaaatacaatccaaaaagttaaggaaatatacttttaaattcagtttctcattcagatatattttgaatctagccaaataagctcagagataaaatgcttttataacaaatatgaaatgttcagatttcataaaaattgaagcatgtttgctagattatatagaaaaggcagtgtagcatttgagaaaacaaatgtttgatgtgggcaagatttataagcatgatgtattagttttctatttctgtgtaacaaattaccacaaagtcagtggcttaaaacaatgcaactttattaccttatagtttctttgtgtcaggagtctaggcacagcttcattggggcctctgtttaaagtctcagatgctgatgttaagattttggttggagcggtgatgttatcagagacttgagttcctcttacaggctcacccattctagcagaattcattttcttgtggaaatgaagtcccgttttttgcttggtgttgcctggagactgctttatctcctaaaagctgccttcagattattgccacatgggccaccccataggcaatttacatattgtttgctctgcaaagccagcaggagagtctctgctgctgcttcagatctttctttttcctgactctgacttaatgagtacttttgtcccagcctctcttcatactgtcccactgagagatcctttgatttcctttcatcctcctgtccccttacatttgcttttgactcctgtattagtttgttttcatgctgctgatgaagatatacctgagactaggtaacttatacaggaaaaagagtgtattggatttacagttccacgtggctggggaagcctcacaatcacggtggaaggcaaggaggaacaagtcacttattatgtaggtggcaggaggcaaagggagagcttgtggagagaaacccttataaagccatcagatcttgtgagacttattcactgtcacgagaacagcacaggaaagacctgcccccatgatttacttacctcccactgggtccctcccacaacatgtgggcattcaagatgagatttgggtggggacacagccaaaccatatcgttccacccccagcccctcccaaatatcatgtcctcacatttcaaaaccaatcatgccttcgcaacagtccgccaaagtcttaactcatttcagcattaacttaaaagtccacagtccaaagtctcatctgagacaaggcaaatctcttctgcctaagagcctgaaaaatcaaaagcaagttagttacttcctagatacaatgggggtacaggcattaggtaaatatagccattccaaatgggagaaattggccaaaacaaaggggctacaggccccatgcaagtccgaaatccagcatgttagtcaaatcttaaaagctccaaaatgatctcctttgactccatgtctcacatctaggttatacggatgaaagaggagagctcccatggtcttgggcagctctgcctctgtgactttgcaggatacagcctccctcccagctgctttaatgggctggcgaggagtgtctgtggcttttccaggtaaatggtgcaagctgttggtggatctaccattctagggtctggaggatggtggccctcttcttatagctccactgagcagtgcccagtggtgaactctgtgtggggactctgactccacatttcccttctgcactgccctagcagaggttctctttgaagggcccgcccctgcagcaaacttctgccttggcattcaggcattttcatatatcctctgaaatctgggtggaggttcccaatccccaattcttaacttctgtgcactcataggctcaacatcatgtggaagctgccaaggcttgaggcatgcaccatctgcagtcacggccccagctctacattggtccctttcagcaatggctagagtgcctgggatgcagggcaccaagtccctaggctgcacatagcatggggaccctgggcccagcccatgaaaccattttttcctcctaggcctcctggcttgtgatgggaggggttccatgaagacctctgacatgccctgaagacattttccccattgtcttggggattaacattcagctccttgttacttacgcatatttttgcagctgacttggatttctcagaaaatgggattttcttttctatcacattgtcagtctgcaaattttccagacttttatgctatattttcccataacttcatgatttaggagacactatagaagttgatatggtttggctgtgtccccacccaaatctcatcttgaattcccacatgttgtgggaggcactcggtgagaggtaattgaatcatgagggcaagtctttcccgagatgttcttgtgatagtgtaagtctcatgagatctgatggctttataaagtggaatttccctgaacaagctctctcttggcctgctgccatccacataagatgtgacttgctcctccttgccttctgccatgattgtgaggcttccctagtcatgtggaactataagtcccataaactctttttcctgtataaattacccagtctcaggtatgtctttatcagcagcaagaaaatgaactaatatagtaaattggtaccagcagagtagggtgctgcagaaaagataacccgaaaatgtggaagtgacttgggaactgggtaacaggcagaggttggaatggtttggagggcttagaagaagacaagaaaatgtgggaaagtttggaactccctagagacttgttgaatggctttgaacaaaatgctgataatgatatggacaatgaaatccaggctgaggtggtctcagatggagatgaggaatttgttgggaactggagcaaaggtgttatgttttagcaaagagactggcagcattttgcctctgccctagtgatttgtggaactttaaacttgagagagatgatttagggtatctggcagaagaaatttctaagcagcaaagcattcaagatgtgacctggttgctgttaaaggcattcagttttaaagggaaaacacatgataaaagtttggaaaatttatgtttgggttctcagggacacctgctccttggatgagcaccatgaccttggctcacagtcttgccttcaaggtttagtaactttgttgggggcctatcacactacatacaggaagcaaaatttttaatctctcctagatgtactgtgtggggagggcacactgacagattcaggaaatgggcagaaggcttcttaggggagatgacatctagttaagactgaggggaagtgttggggcagtccaagtggagggagcactatgtatacaggcatggaggcatcagagcaccaattccctgtgcctgggaatgtatggtagaggtagtgctgtgaggagagacatggaattggtaggctagagccagatcacaaggattttgtcctaaggagttttaattctgtccgaatgtgatacaaaggcattaaagggtttttggcataagagccatgaggtttattttggtgctttaagaaaaaatttcctgtctgcaaaaggaaaatagggtaagatgggattgagattgaaaacagacaatagttgtatgtgttgtggggaattattcattcaataaatgcagtattttatttagtatttaaaatacctcattcagaaaacacagggaagtagattgattttgtacctcttgtcccaaagaagctcactgtctagtgtgtgagacagaagaagtcataaactaaagggacataggaatgcttactttcaaaggatttcatcatttacttaatgtaaaacaaaacagtactgagcaaaatataagtgcttagcagaagttattttgaaaacagtaatcagatttgatctggtatatttgtaacctgtaataatatttagtcttttatttcaaagttttattgccaaaataagacctacccattgtttcgaatggctactaaatactttaatcaggcagacttgaaaacactatttggtttgctatttcattgttttaaaggtttaccttaccaggacctgattgcaccattactagtagcttttctgaccctaaactctctttgatgatgttggcctcacacagaagagattcatgataacacacataagtacaaatagctagacgataaagtgatacacacacacatatatatatggaagattattttgcctgtagctatttcttatattctcttggttctgtcttcatgggtacaatgaagataacaggattgatgggaaagctgtgtgttggttgccctcaggtatctttagcaggtatcgttgtgttactttctcttgttgacctgctcacactactcagtgccagtattcttaggtgagctggggtatattgtaaaataaacaaacaaacacaaaaacagttgaggcaagctactgaattgtttttcagctcattttaagatagcatgtatttttaattggagttaaagcccagagtaaatttttacttttataaagttgaatctccactttggtggaaaatttggttattttctgtaaatctcttgttctaaaattaacttcattgatgggagaaaatgttggacatttttctaagataaatctagaaagtgtttcaggataacatcttcataatgtttaatggttaaatgcattatggacagctaatgaagagagttaagatcttatttatgttcatattagcagcatcatttatttgggtctgttatagactcaaattgacattacaaagaagtaattgtgattcagtgatatgcatatatttagggtttaaaaagtttgtttttctaatacagttgcataatcaaacctttcttgcttctgtgttttgtatcagcataagctgtctgaggattttgtttagttttagtacctctagaagtcagaatttagcgcagtaagccttggcttggatggacttgttatgtcatatcagattctggacagtaatttgtcaggctggttggaaaaaaatatatattctgatttttaaaagtttcattagaaataattgattatcacatttacttttcttagaaatttttctcagcattgactttttgttgttatatctttaaattggaataaaacataattctagttgacgtttttattaatattctgaaaaaagtgaggttggattgcattgttttctgttatctaatgaaaaggacagtgtactggagcagatacatacaactaattccaccactaaactcacagctcttgtatactagttgtatgtctttgggcaagatatagaactattaaccttaattttctcatcaggaaatggagaagtagtgacagcacctattgtagggctacaaggtcgttgggaagatcaaattagataatgtatatgaagtgctaagcctagtgcttggcatcagcaacagcagcagatgcaacagcatcctccactcaccatgtatcatttccaccttcactgccctacttcaggccttcatcaaggctttcatcagctttcactgttttttgcagaaccttatgatcccattctgcatattgtggtcagtgacctttcaaaccacaaatttgatcacactacctgctggcttaaaatgctccattgactcttctcattggcaggataaaattcagactacattatttatattgtttttatggtgttccattatttttattttctgtggattttgtgagaattagtatttatattggttaacagaatatatagatgtaaataatctgtttagatattagcagatataaagatacattaatggttgatgggcacttcacatcaagttgcagatctttgatagttcatggaaggtgtctttttggctttgtttttgctttttttttttattcaagtttcaggtcactttggatagtttgccttgtagatttactgcttgaactttgaagactgaagaatagggacctcacaaagggaatgtaatataatggtaatagcttaattggaaaggaaggaaactaggccgagacaagagagaatgtgtatatattaggctagatgttattgtgagggatttcctcaagaatcatctatgtattgactattatgtatatttatatcttattgcatcaaacagcattactacatattgatggaaatctatggtagagtgcctgtttggaaaccagggataaatggttgctatgtgagtaaagtcatcaactgccagcacagcagaaagcagaagaaatgtgtagctatctacccacagcctatcactttctttctattcctagccatctctatgggcttcccagcccttgaatttttcttcctgtaaagctgattcctttttaccattccattcgttttgaagtgcaaatgtaccccaaatttctagatagtactttaagcttaacttgaattaattatttccaattctatttgtggacaacttgttacctttaatagttaatagtctgtgccagagccacttagtatctagtcaacaaaaaagtacagattcagtgctgaaattgagagtgtttagaaaccgctttagcaatttgacagtacctaaacatttgttactgcattttacaaaagtaacagtcagcagcagattggaaattaaaaccagaacctgcagctaaaacaaaaaccctggtctttcactacagtaagtttgaaatgttctggtttatgttgttaggacattgcagtctctggatttacctgcattctgacagcatgatagcttttgtcagagtaacaaggccaggcaggtagtttaagatggcaggcacagtaccaggtgggaagtgaaaatatactacactgctgcctcctctgagacagtgatgcagtgaggcacccaagcttcatggagaggctgcctccagtcctcagtcctagtctgtaagtgctcccagccctggccctggacctgtgtgtggtatgtgaatctttaggtgattctggtgctggctgttgagcccctctcaagctgtgcatcttaacactggaggctccacatctgagagggacacactgtcctcactgtgccttttctgaattcctggcccacaggatctgtgagcataataaagcgaatgttcttttatgccactaagtttgagtaatggtttgttacataactgtagtattggggaaaaatccctaaaaattggcctcacctagaattgtgatttaaaaaaaaactggtgagtgaaaaacaccttgtcctgccattgatgtgttgctttttaagtcattatagtattttgactttgtaaatacatgtaaaaaggtagttaataatttcagtgtcatacttaattgcctaggtatgtgcgagttctaggcttcatcttttatgaaccttaaattatgcttaatgcattatatacatggatgctttcttagactaataatgtatccagcactaagctacaaacatctccagactttactaagagccaaacccaaaggacctgatttttcagaactagtctctgtaaaataccatgaaaagaggatgtgtaggttccttttagcccacagttttattagaatattattaggggcgtttctaaattcagatgatcctaatatactttgctgtgaatttttgaaagatgttatatctaatataattgagcattagtaaactgaagaagtttcctctgttgtagggtttgcatattaaatctacattgttttaaattaacttaatttctttgcatatgataatattattactttttttggtacttggatctgtagaagatggatatagcttttcttagaatactagaacacatgagcctctttttcatttttgccattattttcttcctcctcaattaattgtccgttcgcttatacatttattaaccataagataaaataatgtgtcatttattgagcatctgctatgtgccaggactatgctaggtgctttgcatactattaattcattttatcatctgtaaatgcaaaatatatattatttccgtttgacagataaggaaataggtttgtatattaatatttgtattaaagcaaaaataacataaggttatttctaaatggtttttgacccacaagtctagtgcctcgtatataaatacctgtttatcaacaagagagccatatctgactttatctaagtagctaaattactcagatacatgtattttcatttaatggatcaatttgtccattagtagtttttttaaccctggcagaaaaatatttttatagtaatcctaacctgagtttcatgatgaaatactgaaaataactcatggttattaatgatttaatgccagtagtataatggtagctttgttgaggtttaagagggaggttaatactggggtctggaatctactcagttaatcccccagctctaccctgtgctagttgtgtgaccttgtcaagcctctttagcttccttatctgtgaaatagggatgttataactgtactctgaggtaagctcatttggttttttaattatgtgagaaattttactaaactagaaatttttttcttttttgtatttgtaaggactagtttgggctttgcatgcattttacatgggactaaacagggcaatctttgcagttgtattgttggtgtgtgtggcactttttcttagaattctcatgatttgttcatttataacagcactagtcttatgctttatgctaactttttaaaaattggcttttctcagttttcttttaaaaggggctttgaaacaccaaaaaattagttgtttgaacactgggcatcataaatatgtttattttgagcttagtcttcaatttaatatgtgttgtatctataaagattttaatgagaacaggaaaacaattgtatatatttgaataattatacaaattataattgaaagaaaaataccatgccagattaaaactaatgttaattcttgtgatcattttttctgggatctggtgtttttatttagcataatggacatcaactttatgatattggaatatacaataatttttcctttgaaattaataattaatgttgattatggctttacttagaagttaagcaggtttctagcccaagatctttgtatgtgttgttctctcctcttggacgactcttccctactttcatcacatttcttctcattagggctcacctaaaccccatttctccacagacgttttccctctacattgctgtactccccactcctcctagttttttcataagttgatttctttcatagattttattacagctttaagctacattatttgttctttttacctatttgttgtctgcctctgcccattataactaagctccacaggatagagggcaatgggtcttaactactgctttcatatagagtgactaggagagcgttgacgacaccaccagcagttgatgctcagtaactatgatgagtaacagtgaaggaaagaggtaagtagcatcatcccaattttacaaggtcacacagctgctcagtggtaggactggaatttaattccagtagtcagtctaattccaaacgctttgtttgggcccaggagaaagcagttttatatatattttcaaattgaatcgttaccataatcctgtggaaagaatcattactgatattttacaaatgaggaaactggggttctttgtgactttgtcaaaggtgcattactgcaaaactagaaaagcagtttatttggtctcaagctcagtgttctctagtgcaaatcagagatggcttttataagtttactttttgtgtgttgtgcaatctttttctgtgatcatttgaactcaatctaaatctaccctaatgtgctttgctgcaaacttctcctaaagaagtaaaagtaaaggagtatattttctatttcaatcttgcacccttagctaagcccaggtaatggtgttaaacagatagcaattttgaacttggaggcttgtttcattcccagtattttcagtaattctgtctttctttcagcaaatatttactgagtgccacctatttgcctgattctgtcgtagctaagcactggagaaaacaatgctgagcaagactcagaccctactctcaacgtagtaactatgtaaaaatatttaaagcagctttttcttaaaaaaaaaaaatgtaatacagaaatgaatgagatacctatagtcactaaactggaaagatgcccatgagatactgttcattttaaaactgaattgcagcccacgagatgtagcatgagtctactttttgttaaaaatgaaagtgtatgggccgggtgcggtggctcacgcctgtaatcccagcactttgggaggctgaggtgggcagatcacctgaggtcaggagttcgagaccagcctgaccaacatggagaaaccccgtctctactaaaaatacaaaaaattggccgggcatggcagcacatgcctgtaatcccagccactcaggaggctgaggcaggagaatcacttgaacccgggaggtggaggttgcggtgagccgagatcgcaccattgcactccagcctgggcaacaagagtgaaactccgtttcaaaaaaaaaagaaagtgtatgaattatataaaaaagagtaacctccaaaactgaataattactatatctggaagtgggatttgataagcagaaggtggaactttcttctatacatttttctaatgataggatcaagagtaatttttttactttttaaatatttcttagcatttttaatatagaaaaaaattaaaggatgtagagaatatttttatatggagaatgtttatagatatactatattttaagtgaaaaacagtattagagtatgattttgattttctgatgtatctaaattttctctgtaatatgacttttataatatgagaataaagaagtttttattaaagcattcttcctgccctgttttcattaagaatcaaataaaaacaaataaacaagaaaactaaagcaagataaagatccgaactaaaaataggagttggtggtagtgggaatgtataaatagggaagcaccttattttctgattttttgtctttcctgatgtgtcatcaattaagtttatttgcttaattttaatgctaattaaacatttattgggtgcttattaaagccagatactgtcctaagtactttacatatgttaatcctccgaggtatgctctattattacccccatcttaaagatgaggctcagaaaagttaaatatttcacctaaggttacagaactagtaagtggtaccccatgataaaaagctatgtagtctttcttttgctatttctaagtgccagtttgtgagctctaaatagcaatccaattttcaatagaagtttaggtttttctgcgttaatagaaagagattattaattttaggtcaggattctggcagtcctagcgtccaaatgtatttttcagccccatcagggattgtgaaagagcctttgtgatttctacatctcaccagaaatgaacagatacaggtgataaaattgaaggtaacatgttgttggttacattctgttttttttcctctgggtgggcagcttggcataatggaaaaatcatgtgttttagcttcagttagatttcagtttaattctggcttcagcattttctagcaccagcctttagttgaggcacattattttttcacttgcaaaataaagatgataatactgcccttttaggatggctgtgaggattacatgaaattatgtaggcaaaagacctttaacatagagtcaggcatatattaggatcttaataaatattaaggcatttcttcaggtaggtgtatcagaataaaatgaggattagtcttgggaaacaaattctacctgattttctactacaaaatgcaggtacaactgcttctggagaatattctgcaaaaaagtattaatattttaagatgcctgattaatttagtacatccttatgtacagatttaaatgatttgtgacaattaataagtttattcttaattattcttgcatttcaaatcatggtgatgtaaaacattgtagtcaattatctcacaaacatacattttgaaaattaaaatcttgtaataataggaatgttttctctcaaatcatactaaactcatatagcattctttgattagttttctcatatgagctttccccaccttggtcttttagatcttttacatgttttcacagttttgtctattttgcaatacatttttctttttttttttttttttttttgagacagagtcttgctctgtcacccaggctagaatgcagaggtgccatcttccctcactgcagcctccacctcccaggttcaagcaattcgcctacctcagcctcctgaatagctgggactacaggtgcatgccaccacgcccagctaatttttgtatttttagtagagatggggtttcaccatgttggccagactagttttgaactcctgacctcaagtgatccacccaccttggcatcccaaagtgctgggattacaggcgtgagccatagcactggtcctgtagtacatttttctatcactttttgctaaccttttcttttttctgctatttaatattaaatgttacccatttctacttgtgcttttttttttccaccttttcctttggggtgatttaaaaaaatgtgatgcattgtactctgctgactgtacagaaaaatatcttagtatatttattagagtgatggcagacctgacctgtgctgtccattggtatctaatgtagtttagaatcatgatgccttctcaaaaaggggaggtgagaacttagaatctgactggggaaccaaggagctgccttttcagttgatttgggatatatttcttagtttatttaaaattgcttttctggctgagcacggggctcatggtaatcccagcacttagggagaccgagggcgggtggatcacttgaggtcaggagtttgagaccagcctggccaatatggtgaaaccccgtctctactaaaaatacaaaaattagccgggcgtggtggtctgcacctgtaattccagctacttgggaggctgaggcaggataatcacttgaacccgggaggcggaggttgcactgagccgagactgcaccactgtactccagcctgggccacagagtgaggctccatctcaaaaaaaaaaataaataaataaataaaaaaagagaaaagaaaagaacgattgcctctcccacaatttaataattgagtatatttgttatgtgtttaatagatgagctcagtttcaaaatacttactttatatatgactttatgatttaactaacctaagataaaaggtattgggcttaaggaaatccaagaatgattggatgatgaatccaagaatgattggaaatccaagaatgacttcttaggtattatttcattttgaatgaaatggatatatatgaaaactaacttctttaaaaaacacaattttcggccaggcgcagtggctcacacctgtaatccgagcactttgggaggcctaggcgggtagatcatgaggtcaggagtttgagaccagtctggccaaccccgtctctactaaaaatacaaaaattagccagacgtggtggcaggcgcctgtaatcccaggtactctggaggctgaggcaggagaatcacttgaacccgggaggtggaggttgcagtgagccaagatcacgccactgtactccagcctgggcaacagagcaaaattttctctcaaaaaaaaaaaaaaaaaaaaaaaccccacaattttcactttctacctctgtgagtttattttactatattaagggaattctttttttttttttttttttttttttgagacgagatctctgtctgtcgcccaggctggagttcagtggcacaatcttggctcactgcatcttccacctcccgggttcaagcaattctcccacttcaccctcccgagtagctgggattacagggccgcgccaccaagcctggctaatttttgcatttttagtagagacagggtttcaccatgttggccaggctggtctcgaactcctgacctcaggtgatccacctgctttggcctcccaaagtgctgggattacaggggtgaaccaccgcacctggccaggaattcttatttttaaaaaataattttctttataaattttactctcactatattatctcagcatagtaatggatatgaagtatgttcattattaacaaaattacttgttttattctgtagtctaatgtacatcatcatcaattcagtaactgaaaataatattttaagtaccaagtgtaatgacttttcctctttactatcagcaatttcctaagtttgtttatttgttaaataataagctgttcaggaatttttcattctcttttctaagatagtacttttgatgtaagaaggctggtgcatgagagtgcttgagtacataaatgaaagtgttaattgttagtgaaaacaataataaaaaatcagaaattctttaagtagattggatctggaacaaagtgaaaagattttatattttcctattaatatagttctccagtatagttccatagacccatagtaccccttaattctaaattgtagattaggaaattttttgtattttccttttagaagaattgaaatcaaattctgccacatctgccaagcctggctgaactttcattctgtatgcatcgttattcatcctttatctgtagtccaggatacttagttactctcgtgatgacttaatattttctcttcctcctgattatcataaatattaggggccctcagtggaataatttaagaaaaattcttccctaaacagcagatctgaaaagcttactccccaaatatttattcaatgtactatacaagggaccttagtttacctctctctgttaagcctcataacacctgtatcataaaactatcttggagactattgataatgtatataaagtgctagtgtgggctatgtaatacatagcagataatcaacaggaggcaaatgctgcttttataaaaatgtctggaacaaaagccaatatatgccttctgctgaaagtgctcatttgtgtcctgattatggtcactgctattcttcccgaaatctttactcctgggcagtaaacaatgccagcagaaactaaaagtgaccatttttcttctctctaaagaaaaatttaatattgactgcatttgttaaaataagacattgtgttatgtttattaggcagatattcttgggggaaagtttttttttttttttttaaagatctctcttatggccttggctaatatttgaaatcttatatcttagaaaaatcttcattctttgtcacagttaaggggtggtttgactggattaatttttttccttagaaaattttccataattttaaaagtatttaaagccttttggcttctagcttccattggttcggttgagaatggatttttttggaccactttgagtctttttttttcttcgagatggagtcttgctctgtcacccaggctggagagcagtggcacaatctcgtctcactgcaacctccatctcccaggttcaagcgattctcttgcctcagctttccaggtagctgagattacaggtgtgcaccaccacacccagctaatttttgtatttttagtagagacaagggttcaccatgttgcccagggtggtctcgaactcctggcctcaagcaatacacctgcttcagccttccaaagtgcttggattacaggtgtgagccaccatgcctggcctgaccactttgagtcttgatctttaatcagtgacctgttttgtcactcagtaacctttaaacctttattcctgttgttttaaacaatttaccagataccttttggcctccagtggctgtttggaaatgtttggggaaagttttgatagtcaacatccctggggatgctgggggagggtccttttggcatttcatatctgtaggccaatgaagttaattttcttgcagttaatttccttgcaacagagggaacagtctcacccaagatgtcagtggaggccctctttggaagtgtaaccttggggaaatataagaataattacagctgcatgttgattatgatgtatgacaaaggaaacaagacacatacaccaaagaccaatgagtatgtttggtaatcatgttatagacatgctatgtgaaattatggaggaagaaagtataaatgacatggtacaaattgaaacagaataaaaatcactatgtgaaatacagtcattaaaaattacctttctatatttatcacgttatttcttggacattataggcagtattatgcttagtaatgtttctgacactttttcggtatttccacttttgacacttttctgtatttccaagtagtacccactcttaattactttaacagatcaagaaaattaacccttttgtatagtaggatatctatttgtaacataaactctttttttatagtaggatatctgtttgtaacgtaaacacttagcaattccagatccagaaagatttgaaaagaaacatttttgcaaaggctagaacatgactgataataatagctatatatttctaaattagagtggcattcagaaagagttgatcagggttgtacttgtgcagtttcatagcagtttctgagttagcaatttgcagttctatttcattaatgttttaggaaatgatttaccagaatagcatatgtaggtagctgtattataagaatttggattatccatcatttttctgtggtcccttttactactttactttattaatgttgctgactaagaaaactgtacattagaaatgcaggactccaaggaagcaaagaaggagtaagataatgaggtaggaagatggaagaagattttagaatagtagtttgataattttgtattaatagaataaagcattttaaaataattattaatgcagagtcttcatcttaatttgcatatggtatacttttacctttcagaacctaaatcacagccacagcagcttcatcagggacaatacagatcatcaaatactgagcaaaatggagtaaaagataataatcatctgagacatcctcctcgaaatgataccaggcagccaagaaatgaaaaaccgcctcgttttcaaagagactcccaaaattcaaagtcagttttagaaggcagtggattacctagaaatagaggttctgaaagaccaagtacttcttcagtatctgaagtatgggctgaagacagaatcaaatgtgatagaccgtattctagatatgacagaactaaagatacttcatatcctttaggttctcagcatagtgatggtgcttttaaaaaaagagataactctatgcaaagcagatcaggaaaaggtccctcctttgcagaggcaaaagaaaatccacttcctcaaggatctgtagattataataatcaaaaacgtggaaaaagagaaagccaaacatctattcctgattatttttatgacaggaaatcacaaacaataaataatgaagctttcagtggtataaaaattgaaaaacattttaatgtaaatactgattatcagaatccagttcgaagtaatagtttcattggtgttccaaatggagaagtagaaatgccactgaaaggaagacgaataggacctattaagccagcaggacctgtcacagctgtaccctgtgatgataaaatattttacaatagtgggcccaaacgaagatctgggccaattaagccagaaaaaatactagaatcatctattcctatggagtatgcaaaaatgtggaaacctggagatgaatgttttgcactttattgggaagacaacaaggtatggatgctttaaagatattatacactaatattacgaaatgtaacattctagtgggactttatagaagctgtcactttggaactatgagtctttttctactattgtacctgtttaaaatctttgaacagatttatagatatataaaggataaacaaaatatttaatatttttatggatgcctagggacaatctgtcccgtaagatttggttaagttcggtttggttttagcttacatgccagaaaagtattgtaaaagtaattatgtgaagttgagctttattttacttatcatcaactgaattacatatgtttgcttttcactctggtaaaattacactgattcacaaggaagaaaatcagttgagaggcacaaagtaaaattctgcagattttcagttgaagaaaatagtacacattcagcttacttttttaaaaagttaacatataagttaattatttattttataataattttaaaattattaaaccattgcttctcggccttttggctaagatcgagtgtaaaaattattaaaccaatttttagttttatattatatggtggctaaaggcaaagaaagaaattgtaggggaaagaaggaaggaaagacagaagatgagggcaagaaagagtgcagtgggtcaagtaaaagcctacccaagagatagaagaccagcccagtgagagcaagaaagggaaagggacagagggaccatcagagagaaggggactttgcacatttttttccttctgcccaacatgctcttctatcagctactcttctcatccttgagggcttggctcaaacatcacctcctagaagaaaccttctttgacctgccccatcctcctacttacattattctcttaatcagtgccttaattactttttaaaatttatgacaacttgtaaatattttttgttttggttcttgaattggtatctttttgcactaccatgatattaagttccttgaaggctggactgtgcctctctggtttccgtctgtagtcttgcttctttcacagtatagggacttcataattatttgttaactctgttaattagttaattctggagagagcaattacatatgagaaaagtaggatggtgtggggatggagacaatagcaaggtagtaaaaacgtatgtaagggagttacagagcgaagggtctgggaggatgtgagaagcaactcaaaagaggaaaaatattttaaataattttttttttgagacggagtttcactcttgttgcccaggctggagtgcaatggcatgatgtcagctcactgtaacctccacctcccaggttcaagcaattctcctgcctcagcctcctgagtagctgggactacagaaatgcgctaccatgcccagctaattttttgtatttttttttttttttttaagtagagacagggtttcaccatgttggccaggctggttttgaactcctgacctcaggtgatccacccgcctcggcgtcctaaagtgctgggattacaggtgtgagccaccacgcccggcccaaaataaatattttataggttgcagttgatacagtaaggatgtgcctatgagagtgtgtggctaaagggaatggtgtaagtaaaggtaactgaagatttcaaggaattgaaattcacactaggggtttgggtggatcctttaataaggatgctgtaggatttggggtcaagaaccaggccttcttgtgctcattaaataatgaggtataagcagagtgttagatgttgcctgatgatagaataaggaggagtacagagtgaaacagctagatggcataggcttttaagatttttgtgtgactgggatgatgattatttagaaacagcatctctgtcacatctttacttaagcctggaaagaagggaagagacagcactgggtgtcttttctttttctctggaaaagcaaaagccttcccaggaataccagcagatttggaactatttcacatggccacttcctggctattaggaagacttgaaaagcagatgcaggtggtcttcactatccagattcttattcttccaactcagactactttccaaaattcaggaactgtttgttttgagtagtgggagattcattatatttagatatttctccttcatggtggaggcaagaaaaagtgaagtaattggaaagcagtgtttgttgagccaacagtagctaccctagaaataatagtcactgtatctgatgctcctgtgaaaggttaaggtgaggatggaaaagtgttttctgtattggataatgtggggttactggtgaccttgacaagagcagaagtaagagattggaattcacgttcaaaatgtttgaaagccttggtaagtgactcaggctttccattgaaatcccacaaagatcataccctgggtagtaactgcaaaattaaaacaggcaacccttacagagtcaaaagcaactctctacaggatcagggatatctgcttatattctctctgccagtagaaaatgtaactgttttactgggaaaaaaataacatcttctacaacctttccagtacttatctgcagtgtctaatatcctttaaaaagttatgagccatagttaaaaaaaacaaagaatgaatgaatgactatgaatgattatcaaaaacaaaaaagaataggcctacagataattagattgagcagagttctttaacaaatattaatctaatattcaacaaatcataactgagtagctactgctatgtgccaggtgattggggcatatcagatagttatggctgtgctgtactaaaaggcctccaaatacctgttacaattgttaataaaggtctaatgttaattgtaattgtataaaaaattaatactgtccatcagtaatagctgtggtgaaaaaattaaattaaaaaaaatcaaagtaccaaatttattgcctctgctgaatatgttcaaaatgtcatgtagcatctaaaaaacagtacctaacaattcagtacctaacaaaacagtacccaaagtgttttgagtgattggagcattcttagggtaactgaatgatcttctacgatggctactttgattcagattagatgtgtactttcagttgtagtgaggaactgtggactctaaatagattacaccacccttaaccattgggaaaaaggtaaagaataccctgtgaaagagatggaattagttaatcttctgaaaccacaaattgaagaggtggcttctaaatgtcttgtcaagaatggacaactttccagtgttttttaggcagagacaagggtagacatttaagaaaaggaattgagtgtaactatcattaagataccataatcttcttaattgcattgtaatgatattttggagataattaatacattagtatacatattgcttaaaaaatttcctcacaatatcttgccttctttctaacttcatttccataggagaatttgggaacttctggaaagttcttcttcctgtagactgctaaactagttcagctatttttttcgtcaactgaaatattacaacaacctccatattagtttccttgcctgaaactttattccttttaaatttgtcctcagtattgccaccactgtgatcctggtcttagaccatgtcattccttctagttaaagtcttcactgacagaataaatatagattttagcatttttattgggtttatatcccaataaacccatcataagttgaaaatatcataagtcaaaaatacatatatcttagtcatgctaagatatagcatgattcagtgtttgtttaatttacctgaactggcataatttggcaactcagaacaattcacagaacacaaaagtgtggggctaagaaataaaggaagaggggagagataggaaggtataacaagaattctaagatgaggaaaagtacagcatcatgtctctaaacttgctaacattcagacctggaaaggaaacaccgtggattcacttaatacctttgtaatattaaatatactagttaaaaaccaactattttgagggtaactcattttttagaaggatgtgaaaaatatgaatttttgttgcctgtagcattttctaattttagtgaacctcttaagagatactattattggctgggcgcagtggctcatgtctgtaatcccagcactttggaaggcagaggcgggcagatcacttgaggtcaggagttcgagaccagcctggtcaacatggtaaaaacctgtctttactaaaaatacaaaaattagccaggtgtagtagcacgtgcctgtaatcccagctactcgggagcctgaggcaggagaatcattggaacccgagaggcggaggttgcagtgagctgagattgcaccactgcactccagcctgggtgacagaggacgactctgtctcaaaaaaaaagagagatgctattagagtagatagtgttatactgtaatagagtattcaaataccctagcttgaagaaaacattaagagcaatttgttttttgtgtccatttcacctttcctaagcaacattcagacctacaatttctgtcctgaatgggatgatctgtactgaaagattgttccaatcagatgacctattcccagttaatttaacagataaatagagctatatattagttattgaacagataaatttttaaattgtagttaagcaacattcagacctacaatttgggtcctggatgggatgatctgtactgaaagattactgcaatcagatgacctattcctagttaattaacagataaattttaaaattgtagttattggccagacatagtggctcatgcttgtaatcccaacactttgggaggccaagtagagaagatcacttgaggccaagagtttgagaccagcttgggcaacctagcaataccctgtctctatgaaaaatttttaaaaattagccaggcatggttgtatgcacctgtagacccagctacttgggaggttgcagcaagaggacaacttgagcccaggagtttgaggttgcagtgagctatgatcacaccactgcattccagcctgggcaacagagtgagaacttgtctctagaaataaatataaataaataagtagataaaattatagttattaagtaaatcagttccttgtgagtttgttaatatgcatcagttcttagagctggctaacactaaggaaactgataagcctccggacttgcaatgtctttaatcctataaatactggatctaagtgatgcatttagcttcttgcctgacattcctacttcattctagccacttgtgatgactgaagcactgagcagccttttttgcaattttttttttagtcagatatttctgtttttaaaataaattactctatagttatatattctgattagtatataagaattgttggctgggcgcagtggctcacaccttttatcccagtactgtgggaggccaaggcaggcagatcacttgagctcaggagtttgagaccagcctgggcgacatggtgaaaccccatctctataaaaaataccaaaaaattagccaggtgtggtggcacacacctgtagtcccagcttctcaagaggttgagatgggaggatcgcttgggctggggaggcggaggttgcagtgagccaagatcttgctattgcactccagcctgggcgacagagcaagaccctgtctcaaaaaaaaaaaaaaaaaaaaagaattgtcttactaatgtgactcaaaagggttccaaaggtaagtttccttctaaagaatattacacattggaacactttaaaaatttacatttccctcaaatattgccctttatagacaataccagttgtcatatttaaaactccttttgcctcctcagttttaccgggcagaagttgaagccctccattcttcgggtatgacagcagttgttaaattcattgactacggaaactatgaagaggtgctactgagcaatatcaagcccattcaaacagaggcatgggtacgtgatacatattctgtacaaaggcataaactattttgaagaaaatatatagctctaaagaattagatagccatacaaaatatgcaagtggaatcatattttgaatttacttataactggctacccctaaagtaagattttaattcaatgcttacactgaatgaactacaataaaaatgaatgcattgaattacttttcttgtataatgttttgttgtattatgctttggaaataggtgcccttatttacatttgccaaaaatttgtatgcgtgaaatgggtttttatgcatattttgtttttttcccagtttgttactttgaattttactaaattatgtccagcagctgtcaaattcaaatctctgttggatgtgcaatgtcatttattattttagttacaggtaaaattaaaaaaaacactttaagttatatacaattttacactgcatttactgcatatatattgacgtatatatgtacagattaactataaattatctgtttgctaattattggagtagttttgttaccaaatgttatgtcaaagctgtgtgataactttgatgatgtaacttagaacttactgactcatggagtccattttataaagaacttatgtgattttatatagattgattcttacatttaggcaaaaacaggaatacaagacatattagaattagctctgtgaagtttttcgtacttctttcatttctttaatttgtgagtagctgttaataaatttattgttataagccaatatcaacaaatatgttggtattttcctaaaatagcaaaatattctagaaaattatatcatccagagtaacttcatcattgaagggtacattgttttctcatgaactgcttttagttttggtcttctaaaatttttctgtcatatcttcagtggtaccccttctccaccttccaaaaagagaaataaaacggcaacagaaaaacaaaaaacctaatagtagtaataatgttttgggccatggatctttattttttgcctttttgttctagagaaattattttctaaataatttattattccaacttttacaacataagattgctaatggctcatatgtttaattaagagatcgtttccctaactcttatcctctaaactttaattgctctttgcctaaaaactccaaatcatcaatatctaatttacatctttcttttcttggagaaatttggtgtaaccatatttttactcttctgagaggttctcatatgatggctattttcattctctcttttccattaatacacacattttaatctagttttgatgatgaaagtaattatttattgaatctgtatttctacaagttgagtcctggtttgctatttattatgttcccagttgtttttagccatagcagtcaaagattgaaaatacaattcttatgttatttacttcttactttttagaagacttagtaagagattaattttattcttctctccctaaagaaaaatttacttttcttacgtggcttcttctctccttccttttgctgttccagggtggccatagctgatgagcacatttcttattccttactgtagctcttctattcagaggtgtttggtcctgaagtgatcattttctttctacagtcagtgacttttcctatttctcccttaagagtcctcattgctttatccttgattttaggtctgtataaacttagctggacaataaatttatcaggtgtacagctcatttagtgattctgttctgaactacagcaatactttcatattcttcctacttatttgtgaatatttatcctttattatgtcatttattaacctattttctttctctgcagtcaacttagaaatcttttataaaatatttgaaatattttacagaaagaagcaggatagaatcactaaatcttttggagattctggtatttcttttctcctacttttataatcaagtggttgttgacgttttatgaatttgcgtaggttactataacagacatctctggatcatgcacattatgatcagcctttcttctttatctgcataaataattaacttagttgagagaaatatctcctcgaaatatagaggccaccagcttaacatatctcaacctatttctattttaaaaaatatttgtgtgcatatagatgtaaaaaaaccctgaagaaatatagtctgtgttgctgtcagtacatgcaatgtagagttcatatagaattctcttagcccctgagagtattgaaagtgttaatgttggggtctttgagtactttttaaaaattttggtaagaggaaactgtaacaagttttaagtcaaaaatgtacaaaattatcaaaaaacaaaacattcactgtaccaataagaaggtaactgtaactgataagtcatactagaaaaattaaagggctgcaaagctgcagggaaatggttagagaggccttagcacaattacactatggattgtggaatttttaattttttaacttgtgcactatatatgtgcactacaattttttttattgtgaaatggtattgtatctttcattaagatttatgtttgtattgccacaagattttggaaaactcttgttttcctaaatgtagcagtgatcatttagtgaagatttttttaaactagtttgcagaaaaacagtcaaaaaagcctgcatataagccaaaagcctttgtagaaaattagttgcttgtgttgtcttttaaaagtataagcataaatcattaaatagaaagcatgatatatgaagtgactcgatgactaagttaataccttgttgtatggaaaattaaaataaaaatcaagttaatactttaaatctaagtgttaatgtttttctcatgaaatttagaaattatttgccttaaatttgtcagtagaccaaatatttatttctccttttcgtgtggatatgtatttttacttccagaacatactcagggagtatatttttgaaatattttgaaagtattaatgttgtggtctttgagtacacatttatatggccaaaattgtgtttcgattatgattaaattctaattatcttcaaaatgattcattaaacttttgttgtcatccctgatttatttgttctagctagatttcacctgtattttttttttttttggctgtcttaaggtattctatcttaatttgatgtctttattgcagtgaactttctagttaacacacatgagatgcacagcttattattaactggataaatgctcttatttatctcaaaaaatgagttctttgaacattgtaggatttttcttattttagcaaagtaaatgaaacattatggagtctcatgtttcactagtaaaattatatatggaaaacaacagattattttctatttcctaccactgtatgagaaaacattaggggcaaagaaaacctgctacttgtgtttcccacaggccctttccaaattgcttcctttaaactctaaaacgaattccaggaaaccagtaaaaagatgccacaggcaatttggaggcttgtaaaatactctggtgctgctggtcaggcaaactttttgtgttgttgcttctgaattgctctcctaaacctgggaaaacattgttgggtcctcattttccatatatattaatgacctgaattatattgagacttttatatcataagaagtgttttacagtgtgctaatgtctaaactttctttttaaaagttcatagtatctgcttcttggtatcaggaaatgatcattgttcagctattatttcaactagaaaaatgattattgtgtaggtaattgttagttctaagaccttaacatacaatacacatcatcttggccagtaattctggaaggtgataggcaaattgttatcgtcttttaggtgagcatcctatcttaagtgtttttctgtagaatactcatttattcaacaaatattcattatgtatctagtacatctcttagttgtcgggcactgttctaggtgagggtatatgtaagtctataaaacacaaaaatccctgccctctgcacaaagataagaaagtcatagtttttattatatgaaacaaactgaaatatctaattagggtctgaattcttcttgaagctttaaacaaaatatgagtagagaaaatcttactgaagttttaatttaaataattataggttattattccatattagtttaaagataaaattaatgtggaagaagaaagcataacttaaagaattgtatctctttaaaaagttcttatatattttatctatttaaaaagtaaaatttgtttttaggagggtttgggttctttttttatgataattatatatattttcatgttagcgtactttaaaatgaagagctatcaatctcaagttttagttttgaagtaactttgtatacaatttattttataatgtcatcctgggaagcacatttgaaagttaccttttcaaattcaaataatattaataagctataaattattccatcactattataatattaaaaagaaaaatagaaccttccataattctaatgaggagggtgatggagagttgtgatacatataatcatgagtttaaaatgagtcctagataaaggtcgtgttagtaattttaatggcatagttataaaattaggctccatctagttttatttgataataaaatatcatagtagatattaaaaaggataattcttacaaaaaccattgacctcaaaggaggattagaattatgtaacagtgtggttttgccaattagtatttagtaaacaatacaagcacctatgtgaccctagtccagaagatttttcatttttactgataagttcttaaataagtttgcagttataatttttcatacttactggttaaggtcactgaaatacatcttcttctaccacacatattttgggaaactttcagagatcaccatgtgagcagtgctcattttcttttgcaatataaacaacagtaaatcagaaggaaactgtatggctagtttagccccatttaagaacataattttcaaatcatggtacatggaacttagggattccatgcagtatctttaagctttcttttagtaaagtttggttgtgttagatggagctttatttatttcttcctcatctatcacccagccttttaccatttttgtgggaggttgcggattatacaaaaacactttgctggagatataaaaactgctgacacagaaggacagagcatttattcataaatgtattccatatgcataaatgttaccttaaaattcgttcgtatctaactcttaaatccaaattcagtttgtgatagctaagcctaacggaatattatgaaaaacttgaggtttagttttgatctagctatattattcaatggggacattttaattgaccatttaaattaatactaagaaaataatatgctgttttaataatctgtacaaagtattgtttgaattctaatatctgataataacatattataatctatttaaactatatgtaaaaacatatttaaaaggtttctgggtattctgagttttcctttattgagtaatgaaaatatagattatgttattatttcatgtttcatttttctgatggtgaagtaaatcccaaagtgaaataacatgacacgatattacctaacacatgccgtcactctttttaaagttattttaataataatgcatctgtttctaactttaattacaattcataaaataatttaagcctcaaattatttaactattactaagtggacattagttccacttcatggttaaacaaatttggaaaatgctagattaaaaatattaaatattaggttagcataactatttgaaaaatctacagcattctttttgtttttctattctttctttctttctttctttctttctttctttttttgagacggagccttgctcttgtcacccaggctggagggcaatggcacgatcttggctcagtgcaacctctgcctcctgggttcaagccattctcctgcctcagcctccctagtagctggcattacaggcacccgccactatccaggctaatttttgtatttttagtagaaacagggtttcaccatgttggccaggctggtcttgaactcctgacctcaggtgatccgcctgctttggcctccgaaagtgctgggattatgggtgtgagccaccttgcccagtccacggcattcttttatttttttttgtatacgtgaataataccagaagctattacattaatcttttatcaactaaatctcccctttattaatggtaacctaaagtatggacttctgaatatatggcattggttaattaagaagtatatttatgatactttacttgtatatccaatattatataatagattgatttttcattcatgtatatccaatattatataatagatggatttttccttcagcatagtcttttttttttttttttttttttttttttttgagacggagttttgctcttgttgcccaggatggtgcaatggcacaatctcggctcaccacaacctccgcctcctgggttcaagcaattctcttgcctcaacctcctgagtagctaggattacaggcatgggccaccatgcccagctaattttgtatttttagtagagacagggtttctccatgttggtcaggctggtctcgaactcccgacctcaggtgatccacctgcctcagcctcccaaagtgctgggattacagtcgtgagccaccgcacctggcctccttcagcatattcttaaggaagcatcatcggtgagagccacaactgaacggggctggaattgttcaggtgatcttatttttccctttgatacttatggttcagtagtcctaaaacttgttctcctggaagtgcaaattttatcttttcatttactttacttatagatacttttaaagctataattttagactgtcctgaattttaccattctttcgcaaatatatgtagaagacttgctaatatactcagtgcacaggaaataaagtagtaaaataagtggatctgaaggatatttttgttttgtcttatttctatggtctcagagatgttagtcttctattgggcatgcatcttgacactcatgtcaatatattttaaaaattttgtacaaattgaaaaggcatccttgttgaatacacacacacacctgtttcagtttctggtgaatttctgagcttctttcatctgcatctaaaaaagcagaaaaataatattgctcattttaccatagactttattccctttcagatggaactccctcagtgcagcttctctcctttataagtcagtgatggtgaaccttgatggtgatggactaaaagtggacttatgatacatatttgattgcataccataatgagttgtcagttgttcattctctttttaaatcctatgtatgtctctacttaatactatttctctttagtcttacttttatcgtcttatgagtcatctctcaatttccattgtttcctaaacattatatccttttggccttttaatttttaaatttctttttctttttacctctggtgagtggtatcttttgatgtatatgggctacccttactactgatcttaatttattgaactttactggacctgtgctgtttattctagcatcgtgtataatgggtttcactgtcatacctctagtaaaagagtggagttgttctgtttccctgtgagaaatattctggtattatagagcttccagctccattaaacttgggaaccactggcaagagttttacattttggcttgaaataactcttttagtagcctgtcattggctgagagctccattcagaagggaaaggaagtactacaacagtgagtacattttatttgccttaaaaaactcatatagtttaataagagtaaacataatgaagaggttctagtaaacaacccagaccatcataagaatacaaaagttattatttttttgtacataattattcttgcctcatccaccctgcttggggttttctgaagtatgttctgaggacattagttccacttcatggttaaacaaatttggaaaaatctagatttaaaaaaatttaagtacattttttgattacaggacttctttgagtcaataacaagttaatatgtattttaaatctccaagagagatatataatgtatgtgtttcacgaagttattttctcatggaattttttttcctgtatagaacctattatacaatgtctacaggaaatacttggaaaccatcttaactatttgtttttatctttctagtttttacatttctcattcataacatgggtaaagatttatctctggaatacattgttttagaatttccaaacctctactaatatggtatttttatgttattaatagagattaaatatataaacagcaatttttcctcaatcacattccaagcctcttcctttctgtgagtagaagacaaaatatattcctgaaattttgtcccttttaagtacttgtgtcattagtaatactattttattgcatacaaatattttattttacatataattatatacaactcactgatcttttaattttattttaactaattctggaaacttttatgtattaactttcagaaattgttatttatgaagactcccattatcgtttttgtaatatagctgttttttttttttttgtgattcttaccttataacctacatgaagtttatatgtcccagcagtgaggtattttcatcatttctttgggttttgtatttgttattccacaataacctagtctaagccaaaacctgaaattcctttttttttaaatttttttctgtcgttaagctagcattggctactaaatcaaaaaaagtgttgggttgggcatggtggctcatgcctataatcccaacactttgggaggccgagacaggagggtcatttgagaccagcttgggcaaacatagcaagacccttactttacaaaaataaaataaaataaaaaattagccaggtgaggtggtatgaacctatagtcccagctactgaggagtctgagatgggaggattgcctgagctcaggacttcaagcttgcagtgatctatgactgtactacactccagcctggtcaacaaagcaagaccatatctctttaaaaaaaaaaaaaaaagaaagaaagaaaaaagaaaagaaaaaattgtcaaaactagtaaattccattgggtatgtgtacatttttaaatggagaagaggcctcctaaaagaccacaatttctactttgtgtcaacatttatattgctcttttattaataggctactgtgttgtctctgaagcctttgaatagtatattaattcattaaaagcttgttattcagaaccttctaaaaaacaaactcttattagtacttaactgctcttgatctcctattcttactttcctgataccagttgataaatcagatgagctgtgatactccatatcaaactccagagctcacttgagagatttcaaagtgagttcatgcaaaggaactctataaataatcaatagatgtatactataagtaccttctcttttaaatcttgatagtatcagaattttaagttagtatatgaactgggttgttagctaaaacagtggaaggagatcagtaattatttattgaatgatggtatattcctggtggtcacctttattactgaaaagtccttcttcagacaccaagcctgtacatgacagtttaatatgatagcttttcaacaaatattctgagttctttttgtaccaaagctactttagaaaaatagatgggtctatatgctcaagggattaaaaggatataagagaagtagaaggtatgttttcttcccttcagaagccacctaatattgttaaggctaccatgacactgagatgataccagtctgggaaccattgctggcatgggtcttgattatagttttacatgataacagcatgttaagtgaatgagataatttaggaagtaattcgggaagcccaatatagacttttcaaaaacttctatttaacagccttttattggcatcttttatcatgtctgattatgttcacttttcccagattgtgtaattaggaaattagggtcaaccctcttggtcatgattattaaagagtttattatacaaagcaagatattagaagtcagtttaattttagttcagtatgattcaaactgtaaaatttagggacatgtaattttaagtgttggtaaccatttttttggtaccacttaatgaatgacttaggacactagtgaccatcttatcttgaaaagacttaataaggctgaaaataatgtggagaatgtacacgaatgtatttttttctcaaggtgatcagataatataaatattattattaggaaatcatgaatttgaccatcagtacccaaaagaatgttagacttgattagattcttagaatatgaaattgaagtattaaagcaaatggaaaaaggagacatatcaaggggttgagagtattggtacttactctaaattttcagtctattttaggtgaactgtttattctcttcctttttgttcttcctctgtttctctcttttttctctttatctaagctcctcctcctcattctcctcctcttttattttgttttctatgtgtttacctttttattcatcttatgcgtgtcatgtggcttttatataggttgcatattttccaactcaggactagtgctcaaatgaagtctaaataaatagagcatcatttaaagtttagaaagcctctaaaagctttgggcacaaatacattgacatacctggttgatcttttgtatgccctgattattgtaaatgcttgctttgtacttggccatactggtggtggttctcataaatggaaagacttttagagactgacttgtattggaacttattacaaaaagatctagaaatgataaaatattgatcatatgcccagtccatttatgttgtattctttagaaattagcaagggaaataaaatttctcattaaatacatttaaaactcattagaaacataaataattaagatgggaaattaaaatatgtaattcatttaagaaaaagtaaggaactagagactagaaagtctaaattttgttatagaagtttaattataaaagcctacattaaaaaattttaggcataatttagaaataaaaaatatatatctcaaggtggtgatgatacactttcctatttattgaaaatatttaaagtggtcatgaaaagactgaatatgtgaatttcctatctattctaatgactatacttacattaatgaaatagtcattgagagaacatgattaagataggaaaaaagtggtcataccaggctgcaggtagatttggtgtcttgattcttaggcagttttcaaaataatttcagggtaaattagcaaaatcaacccttcctaagtttaagggaaaagttatttttaaaaacaacttaataaaaacttacactcttttatacaagagtgtatttcctcttaattaggatggatgttgattaaactcgagatacagctttttgcagtatggtgggttggttttggtgtaacgtcttcaacatgtcgcactggctatcaaagaataagaaaattattgagtatgagtgtgttttataaactttctgagtttttcagatgtcttaatatttttaatagaacttaataaaatgtctagattgaaaaaaaataatttcaaagttttgacagaaactgctaagcaaaatttttaagcaaactgctttaaataattttcattataaaaaatgttttatattctgaaatgagaattactatactttgaggttgcaatgaatttcacataaatggcaaagtataaccaaaaaaaatctcatgacattgttcaccacttttgccattcttggacccaaggctggaaaacattttcagacactgtgctttatcctgaaaggatttggtgaaaagggatctctgaggtgaatatctgctctgcttggcctttgagagaaggggagtgggcaaggctggtcttgggcaaattacttccacctccctttttgcccctgcttcagctccaggggagctggaaatgcacaggaggagtcagaagacctgggttcgagtcctggctctgccacttactacctatgtgactttgggtaagttacctaatatctctgggtcccagtttcagtacaggattgttgtgagaattaaatgatctatgtaaatgtgctctataacctcccaagagctatagaaatataaattcttattatcataggcttagccttcttctcccctattctgtagtctattgtcctcaaatatccctttttaaagcaagccagaatgacttaactacttttgtttctccctatctcctcttcatattgaaaatattatttctatcctctgtctgataaacagttaagtattctaagaatgtaaaacccagttggttaaattaatcttcactatacagagtggattattatgaccccttcttaaccttcccactctcacctttcttctttaatattcccagaattatgtgcttagaaacatcaaagaatctctaatgcatgaaaattcagacagtgttgaggagaaagattttggcagagggaagtcccttgaatcctgtttcttagctcactgctccattagttagtaaggttgactgggaaaatggttatataaatgtgcctctagtccattcattttctctgtgggaaaggaaatggaaatagttcagagttaaaagttcttcagaggtctcactgaaagcttaacctgaggagtatagtagagggaagacataagaatttggtggctatttgtttggtcagtgctttgaatattatctgatttgcctcagcttctcagaaattaagtcctagcccaccctcagccaaactaaacttaaaatgctatctttattgggtgctcagtttatagagggtgcttgcagctaaggaagaaagagaacttgccttctggatcacacctgggttctgatcaagggatttttatgagggcataagaagagcttgtcactgtacttgttccagtcctctccaacaatctaagaatgcttggtctgactatctgtaaataatagtaataatagccacttacatgagccgcttgccattaatgcctaattaccatggagcataataacaattactcatatcatgattagattacattattaaagatttttttattttgtttttttaagccttgaaccattcacttatgctcaatatggtttcttgctgaagtagcagtgtcatctttcataactaaaaattagaggaaaatatggtagaaatcaaatgcaaattgaaacagtaaaatacactttgaaatttaccaattagtggaaaaaatgaaatcataatacttacgctggcaaggatgcagtgatatgggtactcttatacattgctgatggtgctgaaaattagtatgatccttttgattattttttcccaacacttaaaaatgttcataacttttaaaccagtaatcccatagttgctaatgtctcctagggaaatagtagaagaaaaaagctaattgcttggagattatcattgtaggattatcatggtagtgaaaaaccagaagctacttaagcatccaacagtaggagaatggtaaattgtcattcatctgctggatgaactattatacacctgtgataaaaaagatcattacaaaggctgtatgaggaatgtatataagtgattaaaagcaatttatagcttgaaaagacactcaaggtagtggtggttttagagtcaagtctctgggtatgtgtattcaattttataaatgttctgtaattttggattacattttacttttaaaaagtaaaaggaaacaaaatgaaaatagaaacatgttgtgacagatcattattagtttctagctgcaagaaaagtttggtaacagttaacctctcagcccattttcagtagaggttctcattaagaacctgccatttgaaaatctgtgtcatcatagtgactatattattgccctaggatgtcagcaaaattcagtattggaaaatgccctataaagctggttttagcttctgctggtaacattaatataatcctaaaaatattgacaatgtttcaggccttctagagctcatctttatgccagatattaatacattaaatagattgaaatgttaattatatacttgagcattctaagacacgtgtgtgtgtgcacgtgtatgtgcacgtggacaaacgtgagagatatcagtgtttaaaaagttgtgatatttactaaatttttcctttgggggcttatctcagtaaagaaagtaagaaaacgtagaaaataattttgtttaaacttttgtttaatctcatgaggcttaacctattgacttatctgtctattattgaccattttatgaaaagcaatttttctaacatggagcacacttttgaatgagaaaaaatttttttagtgctcatcgtattttttttcatgacaaagtgttgtccactactagctgtggaattataaaacaaaatccaaataggaaaccaagtaatcctattaagaacatacttttatgataatataattaatttgtaaactaccatataataatcttgttgtggcattgaatagtatgcctgcatcatgaacacttgatctctttctaattggtaccatgccaaaatattggtaaatgttcaaaaaagaacctaaacaatttacagtgtgtcactaagagtagagagagcttagaaagatagtctgtttcaaagtttatgccactgcatgttataacactcattaaatgaagaaacacaatactatgaggtttatcaaattatgaaattgatgaacatcccatttgaaaaatgtattctagtgataaattctttggtaaatttaggaacttgccaataaagtatacagaacagaattatttgtattcatctaagcctttgaggataaatgtcttggaacatgcagtaatgtgaagaatttggtgtgaaaatatttgtattagtgaattttactgctttattacacttttcttctcaatagtcatgttcttggaggagttaatgctctgtgtctgtagatacgaagagaggaaaaaactttaacttgcatgaattttataaaaatgatgactgtatttgataaactggtaggatttgtcttagtaaatagattgcctctgggttcctttcttcattggaagaaaaatgaacattttgtgaatgacaagattcttagtctctttttagtattacattagtcaagtaatccagatgaattgtaaaatcactttgtaaagtgccagttaagagctagtttcgcattttgtgttaggttaacttactgggataaaatagtcaaattgcttgactcaaaccagtaaaagaaaaactgtttatgttgttacctggcattataaaaaataaaactttacatttgtgaagtaatagtaatagctcactttattgaactattgaacactcaactttgtaccagacattattctaagctcttttacttacattaattcatttaagtataggagctgcttatggatactgcagccatttcaggatagctctttctgtctgttgagagtagaaagtattatggataattcgtgtttgacagtaagaactatagcatataaattatatctactttgttttactaatttcattatgtatttaaaatgcgagtgagatggaaagcctttccttttggtctacttatataaacctttaagagtttaatgtggtcagtctaattctcttctttagcctctgtatccactgggatatgtggaaagagcatgaattttagagtccacataccttgggaaagatatagaatattttttaactttagttttgttttcttctatggaaaatacctataaaaacatgtaacctcacaggattattgtgaggaacataataattattcagtaaacattttgttaggtcattgaatgtttgaaatgcttggcacacaggttgttaattaatgctggttccatttctcttgttttcctttaaggctttggaaagaacagtctcttttattgttcacctcctgaaagtaatgcttgttgccccttaattgcagcagcagccactgattgaaatttccagatcaggagttgagtatccattccaaattacctctctaggaagtaaacccaaactgcttctttgcactacccttttctttagactaattccttttccttttattttttctgttaaaattttcttttctgtttcaatgtgtattagtccgttttcacactgctgtcaacataaagatactacctgagactgcgtaatttattttaagaagaggtttaattgactcacagttctgcatagctggagaggcctcaggaaacttacaatatggtaaaaggtgaaggagaaacaagcaccttcttcatgaggcagcaggaaagacagtgaatgaggaactgcaaacacttttaaaaccatcagttcccctgagaactcacttgctatcatgagaacagcatgggggaaactgtccccatgattcagtcatgtcccgccaggtctctccctcgacatgtggggattacgatttgagatgagatttgagtggggacacagagccaaaccatatctttccaccctggcttctcccaaatctcatatccttttcacatttcaaaaccaatcatgtcttcccaacagttccccaaagtcttaactcgttccagcattaacttaaaattccaagtcgaaagtctcatctgagacaaggcaagtcccatctgcctttgagcctgtaaaatcaaaagcaacttagttactttcaagatataatggaggtacaggcattgggtaaatgttcctattccaaatgggagaaatcagccaaaacaaaggggccacaggccccatgcaagtctgaaacctggcagggcactcatgaaattttacagctccaaaataatctcctttgactccatgtcttacatccagggcacgctaatgcaaggggtaggctcctaaggccttgagcagctctgcccctgtggctctgcagggtgcagcccttatgactgctttcacagtctggtgttgagtgcctgtggcttttccaagcacacggtgcaagctataggtggatctgccattctggggtccagaggatggtggcccttctctcacagcttcactaggcagtgccccagtggggactctgtatgtgggctggagccccacatttcccctctgaattgccctagtagaggttctccatgagggctctgtccctgcagcagacttctgcctggatatccaggctttcccgtacatcctctgaaatctaagtggaggctcccaaacctcaactcttgtcttctgtgcacttgtagggccaacaccacgtggaagccgctaaggcttgggtcttgcaccctttgaagccacagcccaagttgcatcttggccccttttagccatggctggagctggggtggctgggatacaggacaccaagttctggggctgcacagagcagcagggccctccagccacaaaccatttttccctcccaggccttcgggcctgtgatggaaggggatgtctcaaagatctctgaaatgccctagagacattttccccattgtcttggctgttaacaagttacttatgcaaatttctgcagctggcttgaactcttacccagaaaatgggtttttcttttctaccccatgctcacactgcaaattttccaaatctttatgctctgcttcccttttaaacataaatttcaatttcaaaccatatctttgtgaatgtagatcactgaacgctttcaggataagccaggtcacctcttgaatgctttgctgcttagaaatttcttcagccagataccctaaatcatcattcactatcagcattttggtcaacaccattcaacaagtctctaggaagttccaaactttcccacatcttcctgtattcttctgagccctccaaactgttgtatcctccgcctgttacccagttccaaagtcgcttccacattttcaggttatctttttagcagtaccccactctgctggtaccaattctctgtattagtccattctctgctctagagatactacctgagactgggtaatttattttttttaaataaaaaaaaaaaaaagaggtttaattgactcacggttctgcatggctcgagaggtctctggaaacttaaaatcatggcagaaagcaaaggagaagctagcaccttcttcacaaggttgcagtagagagggcaaaaggggaactgctaaaaccatcagctctcatgagaactcactcactatcacgagaacagcatgggggaaaccgaccccatgatccaatcacctcccaccaggtccctccattgacatgtggggaatacaatttgggaaaagattttggtggggacacagagtcaaactatatcacaatgttactaatataatgaggttttatattagaaatcttaaaatgtagatttagtataaaaatctacaactctttttaaagtaaactagtttttctcacagaatgaaagaaccgtgctcctttaagataacaatattggttgcaaagttataaagatttcaggtttttctttatgaaaaccattttccttcacacttttgaaatcctgcagtttgtaacagccttcataaatcagtgattttcgttttagctctggcataaagtttttcagccagtcctgctgtcagtgtacctgctgcttgacattgacaggattcttgtcaaaacctgggttttgcataaattagtgtttaaccctggacaggcttttcctcctcacttcagagcagcttttaaaagactgtcatgctcttattcaaagataatgaaagtgaatttgactattgtatcatgcattttgtactctgaagaatgtagcttatcaacactgttagaataacttgaactttcctagtcttttttatttctctttgagccttaattaataatctccagtcttacacattgctttacaatatagacatcatcattgatactccagtgtacctttctctttgtccggaggatctatttgctctactttttaataaacaatttacactgggggcaggggcacaacaaaggggcacactttaaataatcttatggataaacttagaatttttaaaaagttgattgtcttaatacttttcaggaagatactatttgaaaaacccaagaaaatatgtgactctaatacagagacttcgtgctttcctaacttgttcttgctgtcactgttttagctacagctgaatggcaaaggagaaatagcttcatccttgaacgagaagaatataacacatatttgatatgatcatacatttattatgttcttcctttgtgtaagatgataagcaaattactctccagattgtaatcagttcccccaacctctgttgaacatctcagatgtttcagatgtggaattacaggttactaaaatacggtttatgaatttcaataaacctagaaatagaatcattacaccaaaatgtaatatatctagtagtcctagttgaatcagatgatacatgtcattcaattttcctttatctaagttgacagaagtaagttcatctttcttattgttcttgtagaaaatcttggggatactttttcttccttcaaccatactcccatcaaaaatgactgagaaggttttctaagcttggaaagagaataattctttttaaaagagagctaattactaatatgttgaaccttttgaaatctcaatgtaagcaaaaattcatacatttaagcatattgcacaaaatcagcatttatataacaagatgatatattctctactaacttactgaggtaaagtagtataaatggttgataatgtgaggattagagtttcaaaacatgattaccattggaatgcttattgtgtgcttgacaccatgtataactcttgatgtacattaactgatttaatatctataggatctctataaaacaaatattaatgtttactttacacactaggaaaactacaaatatgggttcagagctgttaagtaacttgcctaaaatctttgagctagtaagttgcagagctgatagtcaggtttaggacttggtgacatcatagagcatgaaccttcactttatctgtaaatggaggtaaatgataccaacgtacttgagaatttttgtatgaatttaaggaaataatgtttataaaaatgtttagcatattaattgattctcaatatgtgataaattgttctgatgagtatcatttagttcattcaatcttagttctcacaaactataagggtgagaatggaaaatgtagtggttagaggtatcagctggtacttttcaaggtgatagaagtattttacatagggtaggaaaaaaaaccaacctatttctttcttttttttttttttttgagatggaatctcgctctgtcgcccaggctggagtgcagtggcgcgatctcggctcactgcaagctccacctcccaggttcacgccattctcctgcctcagcctccttagtagctgggactacaggcgcccgccaccatgcccagctaattgtatttttagtagagacgggctttcaccaagttagccaggatggtctcgatctcctgacctcgtgatctgcctgcctcggcctcccaaagtgctgggattacaggcgtgagccaccgcacccggcccaacctatttcttttaacctattattccattgctaaaagaacttaattttacactaagactatctttattgtcttctaaaattcaataggatcttggttcaagattaaggtacatttcaactacccatttagatgttacccttttagatggtagtcttctaacttccactcagtttgtaaaaataaaggctgacaagtcaccaaaataacttttcagaaatacctgatgtaatattacatagttaatttcagaatataccaacaataatactgtgccaaaataatatctttcattaacacatggactttaactatacttaaatttaaaactttgtatttaggttgggaaaataattctctacaaatttagaataaaatagatctgggaatagattgtaagcatttcatttgatggcaagcacaatatgagtgaccagtaattgagcacctactaaaaatattaaagcaagattagatatcagattgcctaatagatttatatattgcctaatagagtaccttcatgagaactaatagcattgtattccaagtaagccatacttggaatgttattcttagtactaggttatgcagaatggtaactacgaaaatgtataaaggaaaagatgatcaagatgatggagattctggaaataatggtatttgaccaagaattcttattaatagaataaggagaagtagaatatttatttttaaataatatctttcatatagcaaaggaaacagacttaagaaaatgtaaatagaagttccagaggccgggtgcagtggctgacgcctgtaatcccaacactttaggaggctgaggcgggcagatcacctgaggtcgggagttcgataccagcctgaccaacgtggagaaaccccgtctctactaaaaatacaaaaaattagccgggcatggtggcacatgcctgtaatcccagctactctggaggctgaggcaggagaatcgcttgaacccaggaggcggagcttgcggtgagccgagattgtgccatcgcactccagcttgggcaacaagagcgaaactctgtctcaaaaaaaaaaaaaaaaaaaaagtagttcctgaagttcagatttgcactttctagtgaaggatgcaaaccaatggagttggctgcctgagaaagccagagagctcccttcaccagagttatttgcaagaggcagagccaccatttgtgtgaaacgccatggatgaattttgtgctaaagggaagatcagagcagtgactgctggagtacctcacatttttgaaactatagctttagtactcagcctgataattgataaaggtttgtaaaccatagttttctttatatttcactgaagagaaataacaaactatgggttgttggacatgaatagggagttaaatgtgataatggtgtttggtacattgggccctgcctgctttaaggcttaaatttttcattcttttcctgtcatttttatatttcttaactctcattaagagggtgaaaacatcagcaaacaactatttttgtatcatttgatataaaaattttttcttatatcaagcatttcttataattatctctcctaccactccaagttttagtacttttttgtggcatcaatctggcctgtattttagcaatttggcataaaggattttttttttcctgattttttttttttttttttttttgagacagagtctcgctctgtcaccaggctggagtgcagtgtgcaatctcggctcactgcaacctccacctcccgggttcaagtgattcttctgcctcagcctcctgagtagctgggactataggcacacgccaccacgcccagctaatttttgtattttaagcagagatggggtttcaccgtgttggccaggatggtcttgatctcttgacctcatgatctgcccacctcaccttcccaaagtgctgggattactggcgtgagccactgcacccgacccttttattctgattttttaaaatctgtattataggtgtccgtggcatactgtatctgtctgtattgttgcccagtcacatacataaaatatattggcctgttttagcattaaaagcattctggcattatgatataatcattgctctcagagaaagaattcgttaactcatcttatattagcctaccaatttaagatgtaaaaatgacataaactatgagagagtgaaatagttaaccacttgtgattagtgctcatatgtcttaaccataaaatattctaaaacatacttagttagcatatttgggaaagtagttgcttttgcaaaaataatttacaggcattgacctgaaaacatatcaataggcatagataggcatatgcatttttcattattaatcataattgctctacttctacctttaaaatgttgtttctaactggtttctttttatgggatatcttaaaattttaagggtgtaggctaaaggcaagatgttcaaagaagttaatcatgttaatttattttttgctttatcttaaaatactcagactttatagcgtgtctgtaacttttgattgatcattttcaataatgctcctttgctaatttctttcctccttttgttctatttgcccttttttctttatacattaaaaaagaagaaaaagaggccaccccacctctccccaaaacaaaaaaaatggtaacaataaaatgaattatatgaaattattagtttttgtgaatagtttttgaacttctgaagaaataaaagttaagctggtggcaagaacctttcttcttgcattggctctttcatttttttccaaagacatttttgcttttttttttttttttctgttgaaagcaatttgaagaataccctcacaataagctaagttcctgattttcagcaaaatctatcagtctatttagtttaattgaagtaggtaaacaaactcatgtgttttgaatagaagtatgttttattaacttagagttatttgattgagactaatagccaacactgcctatttgtgaagctctttttaggtatttctcatagaattctcctgataaacctctgaggtcattactataatctatatgagaaaacgaagatgtagaaaagattagtaacgtgcctatgatgtggtagaatctaaacccagactcagatctgacttaagaggttgagctcttacatgccagtgctgtgatatagtatctcttaaggaaatctttgagccaactgacacgttttggaacagaaatatgttccctactctgatttctgggcaagcttttggaatctatttaatctttagaaatgggtttcagagaggtacacatttttaaaaattatatattcgttcctgtacttaactatactatttcaacaaagacaataatcattacatgatgtttatagtagcttcatggctgaagccatccgtttagttaaaattaaccatagaacttggaggatattgtgctaaatgaaataagccagacacagaaagacaaacactacatgatcttacttatatgtggaatctaaaatagtcaaactcatagaaacagagtagtatggtggttgccaggagcagagggtgagggaaatgaggagatgttggtcaaaggttacgaagtttcagttatgccagatgaatgggttctgaagatttaatgtacaaaacagtcactccaattaacagtagtgtattgtatgcttgaaatttggtaacaaggtagatcttgtgttcttttccacaaaaatggagaaagaagaaagaaaatggaaactgaggtgatggatatgttaaccttgattgtgattatttcacagtgtatacatatatcaaaacattaagttgtacatcttaaatatatgtgattcctgtgtgtctatacctcaataaagcagaaaaaattcaggaataacattgactgtagaaaaaagttcctgatagaaaactatgtgaagcaagaaatggaaatatataccgtatgatgcaatgaaaagaacttcaggtgtacagcctaaaggtctcactgaagcatggccatttacacaactttgagctaagtactctgagccttagttttttcatctataaaatggtgagattaattcaaagccttattgtaaggattaaataagataacatgcaaaatgccaggcacacaatggaataagcattcatactcctttttgctgtttcaagttgtaaactcatgtgttttcaaatggaagaggatccataacttttatcatttggaatttaataagggtgacttctctcctactgtcttttttgtactatattctgattaaaatatggatgcagctttttgatgttttcactgaattttcacaagtgcttaacctgccaaaaatagcttatttacattatattaatgtgtagatcttagtgatgttagaggaaggacaatgatgaatagtactgtatttgcttctagtgtcatttaaaaattagcttttcatttatgttaaagttcagatgtcttgtttagattgtgctttactaagaagagcttataataaaacccttgagttaggtattcagatgatttcatgatatcctgtagaatcataaacaattttaatataactttagaaaatatagtatttaaagaaaaaagattagaaccacaatgggatgtcccacagtcctcccgaaattttctgtgatactggaatgaaaatattatgttatgtcagccatgcattttgaaacagttgtttagtgataaggttttggatctgatttttcttttgtcttcaattagcatttttttctcttctgccataaaatgttttgtttaaataaaatgtgctggatgaggtacataaaaagagattatcttagagctgctctggagggatgggagactataattcttcaatatattttcttctaaaggggaattgttttactcagagcttcagaaaccaagataatctgttataaaacttactatatttggttatatatcataataattttctcatatgttaatgaaacccgagggtttttttcaatttaggtatatgaggtgagtttttaattataaaatgagacatttaatttataggagtcaagtatagggtttaaattttctctgtgatagaaggcaaagggagaaaggctctgaactcagagccagaggcctgcattccagttctggctcttccactagctcattttattaatcaaatcactccacccaattggttgtcagtgagtagcaaaggttgaagtaggttgggtttttaatttctgtggcttgagggctacagaggttgaagaaagtgaggaagaggaagccaaaggggtactgctcacaaatatgtaaaaacacccactttaacctaggcccatatattttatataggaattctacgtgagatttcatttgaaacaagagtgctgaatttatcctcaaaataaataataaaaaaatataaatctgctctgttagatttatctccagttcccctgcagttctgagatttacgatacctgtattccttaccctcattactgggtaccacagtgaggggcagtcgggcttgtgaatcagacctgtgttctagcccaagtagtggcactagttacttgagcaagtgatagcctcttagtttgactaactgttctttacaaaatcttcctgttttataatctgtggttccaggctactatgggcccaggttttttgttgttgttgttgttgttgttgttgttgtttgtagtagaactacaaatattaaagtggaatttttttaaacaaggataattggtaaagttcagtattgataataatacatgactcccatgggcaccaaggttgtctgtaatcttcatagagaataagagctgaggctgggtgcagtggctcatgcctgtaatcccagcactttgagaggccaaggtgtgtggatcacttgagatcaggagttcgagaccagcctggctaacatggtgaaaccccatctctactgaaaatataaaaaaattatctgggtttggtggtgcgtgcctgtaattccagctactcgggaggctgagacagaagaatagcttgaatccaggaggtggaggttgcagcgagccaagattgcaccactgcattccagcctgggtgacacagcaagactcagtctcccttccccccacccccggcaaaaaaaaagaaaagaaaagctgattcagctttcaatttttagctactctaatatagaagaatattagtatagttaatctaaaaatagacttgtttttaaagatattttaagttttattaaagtccattacatgttttgggaaagcagatttgtcttcatgatgattgcttaggttttatatgaaaatcagtttacacttccatacatacaagctaaacacctcaggcaaaaggtggcttggaaattcatagaataagtggttcatgtatgaatcactgaaggagatatgtactcattaacatttcatggttcaaaatatcctcaatttcaaggactattgcagagtacactgaatttcatatgctgatgtatgtattgtgactactatacaaattctgttaaaagaaacaaatgattcaattttattaaattatacataacatagctattaggtgacagtattaagtttttctaagtttttattttttttttcattgaagagaataattgccattcccatttcccacctccaccaaccaaataatgtatcactggctcttcacaaagttatgacttgggaaaatgctgaaggaatggtaatataagataaagtgggctaggcatggtggctcacacctgtaatcccagaactttgagaagccaaggtgggtggatcacctgaggtcaggagctcaagaccagcctggacaacatgatgaaaccccatctctacaaaactacaaaaattagctaggcatgatggctggtacctgtaatcccagttgctcaggaggctgaggggggagaatcacttgaacctggaaggcggaggttgccttgagccgagattgcaccattgcactccagcctgggtgacagagcaagactccatatcaatttaaaaaaaaaaaaaaaaaaaggcaaggcgattcattaagtaaaaatgaacatattgctggagctgaggtaagtatctaagtattttcagcaaatagagcccccgccaaatttctatagagagttgggtcagcatttacatcttaggggtagaagcagaggaagaaatgtcccaaatttccaaactcaaacttcctgaggttagaattcttttccaggctgctctgatacttaggagtaggaagtgtcatttgcctagcctagggtttctcaacttcaacactgctggcattaggactggataattttttgttgtgtgggctgtcctgtgcattgtaggatatttagcagcatccttggcctctacccattagagggaataacaactccttccagggattggctgatgcccccagccgaggcagatagctctcacttgagaactctttccttaaaggactggtttgtatgcttagctgcatttcaccttactatttgtggaacacagaacctgacttctatttaagtgtgtttcatacttccttctgaagtgtgttccaagtgaccaatttatgatgaacttttataacacggctcatttataaatggggaatatgtagttttgtctgtgttctcactccagatacagtatacagtaatgagagattgaagatgatatgcaggaaaaacgcagttgtaacttgtcaaacgcacattatagatgaagttgtgtatctcctttttgcattggtttttgtcttttgttgttttcaaaataccacttcatttatgtttggcgtcaatgattattgcggttttgtatcttttcattaagaaggagcaataaactagtaaatattagtataaaagctcatattgagtattagttatttagttttataaaacctatctgataacatgggtgaggtaagcaaaagtctttttttaatatttgaagagatttattctgagtcaaatatgagtgatcatggcccatgacacagccctcaggaggtcctaagaaaaatgtgcccaaggtggtcgggatgcaccttggttttatatactttagggagacgtgagacttcaatcaaatacatttaagaaatacattggtttggtcaaggcgggacaacttgaagcggggcttctagcttacaggtagattttaaaagattttctggtgccaaaatctgagtcccaataaaatggttctgaatctcagaatcttaggcgaagatgacattggacagttcccgtttatgaaaattattgcagatcttgtaaagaatcttgcctgtgagtcagaaagaaaatggccctggtttggactcttcctctaattagctctgtgacttgggaaaatcacttcacctctcttggtttatagactcatctgtcgaatctagaaggatggattagatggccttccagaactgtgccagctataatgtagtgtcagattttttaaaaaatgtttgtaaactatgaaattaaaattatttttttgagttgtaaatctcttacagagtactgagacctaaaggaagaagataggctagaagaggaataaagtataaatttcattcaaagatgactgaaaataaactgatctattaaatcaagctgtgtgttaaataaagaggaaagaagtacccattctgtgctaaaaattactagccatatactataagaagtgattgttatgggtaaccagatttgctctcaacagctctgcaggatgagtatttaaaagttaaaaagcacagattgtgactctgacaatactggaactgaaaaccaaactatcagtatcttttttttttttttttttttttttttttttttgagacggagtctcgctctgtcgcccaggccggagtgccgtggcactgtctgggctcactgcaagcttcgcctcccgggttcacgccattctcctgcctcagtctcccgagtagctgggactacaggcgcccgccaccgcgcccggctaattttttgtatttttagtagagacgaggtttcaccttgttagccaggatggtcttgatctccagacctcgtgatccgcccgcctcggcctcccaaagtgctgggattacaggcgtgagccaccgcgcccggccgtcagtatcttttttacttttttttagcttctactttatatagacagattaaagacatcaagttatgagttacgtgaaagaaatctcatggttggtcatctctataaaaccatttacttggatctggttagttcagttcgtgaattctttaaacacaatagatagaaatagattttcaaatagcattgtcgtttttattatgtaaatccagctcattctctcagcaaatacagtgtcctatctctgtgtattttattaataaaatacagatttttagatgttctccagccaattctgcagccaaatatggagaaaagtagtattccattctaattcctgaaataattacttcatctcctacagtaccaaatatattttcatagttttcagttaatatgcagagtttcaaatgttgtcatttgtcttaaaatagctacttttcacatttagctataatacttgaaaatcattcagaacactgaccagaataataataaataacttctttcctgaatacttttatgattttcttacttttaattgctttgctaaattacagatataatatctgatacttctaaccattttgagattgattgttaatgaaagggatatagggaaaggaaaactcatctggaagttgatctctaaaaggcagttatttaattataccagatatattgtcagatttctgcattctcttctttcagtgatgataggcccctcaggatgatcattaatttttggctattggcttctttcttttacatgcagactgaaacttaaagatttaaacagcagtgttagaatgcaaaaccgaaagatactactgtcttagaagtattagggcaaagtcacaaagctttcccaagcttcagtattctttatataaagtggaaataatagttctttttttttttttaagactactttgcaggatgtctaaaatgagaattatgttcatgccaaatttaaaaatcattgctaaataataggatttgaccaaattatcttaccatctttgtttccattaggtaaaattgcagtaattggatctataaagatttaaagaatagaactcagtcttcttatttacttttctatgttattaataaggtcaaaggaaagcaatattttgagaaagaagattcaaagataaagtaaggaagagaaaaaataggattaatttccaaagtaatgcaaattattgtgctctgataattcagttggaatttaaactccctacttagtgaaatagatgctttctttttcataagcaaaactgagagctaattttttctctctctaatagggcacatacttcatagctgtgttaattcaaaaacatttaaataacagggtggcagtactcagtaagaaaccagtgtggctttggctgtattttgttgcttctaagtccttttcaaatattatcattaactatactctttatgctatttaatctgcttatcctaatttccctatgctactccttgaactggtagatatacccactcagtaagaaagcaaataaaaataaaatagtttgagtcttactctggtgatctctctatcttgcatgaagctttctttatatgtaaattgtattcctcccctattccaaaccattatttttttctgtctctagatgtaaggttcttaacagtgctggagatttcatcagatggggacagacagctgatgaacattctttggctcttcaaccccttttctttattctaccaaaacacttttccatgataaatacctagaaacatttagaagcccaaatattcaagaaaattgtcattataatgcttgcttttctgtatgtttttaccacattgtgtcaagccatttgatgagatgatcttgctattatttggaaatagtttccttttctagaataaaattcaattctaatcttaccactataaatgatgtttttctattaccaaggatcaaaagagttttaacagtatccctgcctttttcttttcttttcttttcttttcccttccccttgcctccctctgttgtaaaagttgacatgtgtgaattccagggcagcttaagagagatattattaaaatagggaccatacaattttttttacttaagaaacttggagccattttgaacatgtaaaatcactactctttgcaaataggaggaagaaggcacctacgatcaaactctggagttccgtaggggaggtgatggccagccaagacgatccactcggccaacccaacagttttaccaaccaccccgggctcggaactaataggaaaaggtaaacttaacattgtgaagtggttttcatataaagaaagatgaaattcatgttaagcatataagtccaattagtgatttttttttctctgagacgaagtttcactcttgttgcccaggctggagtgcagtggcgtgatctcggctcactgtaacttctgcctcccaggttcaagcgattctcctgcctcagcttcccgagtagctgggattacaggcatccaccaccatgcccagctgattttttttttttttttttgtatttttagtagcaatggggtttcaccatgttggccaggctggtcttgaactcctgagctcaggtaatccacctgccttggcctcccaaagtgctgggattacaggagtgagccaccatgccttttaatgtggctactagaaaatttaaaattacatatgtcttgtgatatttctgctgggcagcactgtcctagaatgtgatatgtctttatcttccccagagttccttccctggttaaaaattagttctgccatcctaagtgaagaaatttttttcatctgttctaaccctcagcttctcatgtagtagtagtctgcctagagtggaagtctaatgctaattgacttctgaattactgtagccagccaatgtagcacctttttccttttatcactggcttgttttgtgtccctaatgcaaggtcatcaagtaaacagtcctgacctactgtccatagtgtcacagaagagctacttcttgactctaggtatttttcttacggcatggaataactggtttgtcatttagtgcccatgtctgcttttaagcagaatcaaaagaatatgtaaggactttggcaactttgtgttgtataagacagaacttaacacttataaaataagctcagtgtgcttataattaaagcaattttaaaggtgaatgaaaactgagaattctctcttagctttgccatatatgacaaacccacagctagactcatactgaacaggggaaaaactgcaagcctttcctctatgatctggaacaagacaaagatgtccatttttaccacttgtattcaacatagttgaataaaatagaagtactagctagagcaattaaacaagagaaagaaataaagaacatccaaattggaaaggaagagtcaaattattcttgtttgcagaggatatgatcttatatttagaaaaacctagagtctaccaaaaaaactattaaaactgacaaacaaattcagtaaagttgcaggatacaaaatcaacatacaaaaatgctactatttctatatgtcaaccgcaattgttttttttccccccttttcttcttcttttttgagacagagtctggctctgtcactcaggctggagtgcagtggcaccatctcagctcactccagcctctgccttctgggctcaagacgtcctgccatctcagcctccctagtagctgggaccacaggtgcacaccaccatgcctagctgatttttgtattttttgtggagatggggttttgccatgttgcccaggttggtctcaaactcctgagctcaagcaatctgcctgcctcagcctcccaaagtgctgggattaaaggcatgagagccactgcacccagcctcaacagcaaacaatctgaaaaggaaaccaagaaagtaatcccaattaaaatagctacaaatacaataaaacacctaggaataaatttaaccaaagaagtgaaagatctctacaatgaaaactgtaaaacattgataaaagaaattgaagaggacacaccaaaacactgaaaagatactccatgttcatggattagaagaatcgatagtgttaaaatgacagtactacccaaagcaatctacagatttaatgaaatctctattaaaatactaaggacatccttcatataaatagaaaaaataattctaaaatttatatggaaccacaaaagtcccagaaaagccaaagttatcctgagcataaagaagaaagctggaggcatcagactacctaatttcagattatactacaaagccgtagtaaacaaaatagcatagtactgacataaaaacaaacagaccaatggaacagaatggagaacccagaaataaagctctatatttacagccaactcattcttgacataggtgccaagaacatacattggagtgatgatagtctctccaataaatgatcctgggaaaactggatatccgtatatggatgaatgaaactagattcctactctcatcataagcaaaaatcaaaatggattaaatacttaagtctaagacttgaaactatgacactcgtagatgacaacactggagaaacagtctaggacattggtctgggcaaaaactttttgagtaagacctcaaaagcacaggcaaccaaagcaaaaatgaacaaatggaataacatcagttaaaaagatcctacatagcaaaggaaacagtcaacaaagttaagagaccacccacagaatgggagaagatattttcaaactatccatctgacaagcgcttaataaccagaatatataagctcaaacaactcaagaaaaaaaataataatctgattttttaaatgggcaaaagacttgaataggcatttctcaatagaagacatacagatgcccaacaggtatatgaaaaaatactcaacatcattaatcatcagagaaatgcaaatcaaatacaatgagatatcaccttacctcagttaaaatgacttttatccaaaagaaaggcagtaatgaatgctagcaaggatgtggagaaaggagaacccttttacattgttggtggagatgtaaattagcacagctactatggagaacagtaagttggttcctaaaaaaactgaaaatagaaccaccatatgatccagcaattccactactgtgtatttatccaaaggaaaggaaatcagggtattttatttctttttaattgcttcaaacaaagttttaaattgtggccaaagattgtcaatgccctcattgctggaaggcagccattgtttaatagtggactcaatttcttcagggctgttgaaggcaggtaggatctagcagagctagaagtagagaggaggcagtgaacatgaatgagggtgcagccagatgaggggaactcttagtccccttgaccccttctttagtttctttcatatattttatatactagggttccatgggaaatttcctttgaaaaataatatattgcttaaaagtaaattgtaaaccattaccatatggtaactgtagcttatccatatcaaataacaacgcacacagttcctaatcaacttaaacatcacaattttggtggttttctatgttccctgagttaaaacttccatcgacaaaatgcttgctttggattgtactgttaacaggaaatatatgatgcagatattttggattcctgacatcaataaaaaaaaattggtgggggacagtgccatgaggtatcattttaaaactctcactacaaaattcaccctaaaaaataagacatgtaatcttgtttgaagaaaattttacttagttttgcattgtaattcaagcatatgttatgaaagactatgaagtagaatgaaatatctctttgacatactatctttgaatgggaggttcaaaaataatagtgttctgctcttgttacataacggaatatattcttgagataaaagatatttgtttcctcattcctggtttgtattaacttaaacatctaaaaaaagataaacattgtagccagccatttgacttccagcaaatataagcatgaattctaatatatgctgaaattttctaaggttttgttatctgaaattatcaaggtagtgaaaaacacttaaggtgctttctattatcacttttaaaaaacataatttcacagtcataggttttctttttatgttttgagtacttcactaggtgatgaatgacacatggtagctgttcagtaagtgtttattaaatcagtatgttttgataaagttttatattgtaatttgcacattctttgattatcctaaaactttttttcaaggcccccacagatccccttcccccaaccctccacacacatatacttcctcattgtggtgagagaactggattccacttgagccaaatactaaggacagcttcagtgacagagcaggagatacctaggaatcagggctaggtgagagaaggtcttggggagcatgtggaaaaataggcccaagtctgagaaaaagtggtgacaagtcagatatgagactttaggggagatagagcccaaaactccaaacttctagttcctggacactgtcataactgttaagacagcttggaaatatgagcagatataaaatagagaaattatacacagttctttagtccaaccaaaactttgtgcgtttggagaggtttctgacatgagtggagtcctaggaactagatactaattagtaggagcagcccttagacatgaagtttaagcttcacattcctggtggggtggagtcctctgaagacactgtataggcagaggaaagtttaaacgagggaagcagagtccacagcaagtggctctcagtggctacaatagagaatatgaaccaaaacaatgggtgttagaaatatttttcggtgatgaaaacagcatggcttcaaatacataagagtttgaatttgttgtgtttgatgctgtcatgaacttttgattaagagagtgatatgatcaaaattaagcttaggaaatattgcagctggatgtaggatggattatagcaccaggagggaaagaatctaagaagctattgcactggtccattcaaacattggttagagttgcatgtcctgctgtgaaaagagagatggcagagacctgtgcaggaagcctttgtaagacagatcagcaggaagctcctgctgccatggaggtcaaggctcaatgtgtaaagcagttaaataaacgctgactcacttggaacttccagtttcttctttgtttgatgaaagaatggtattcccagtttcacgtgttagtcagaaaccttaaaaccaatagctaagcatagactactacataggtactgtaaacttattttcaaagtcctggtttttaacaccatttttaactactaaaagatgtatttttaaatgttgaaattttttttgacaatctggtccagcatcaatgtcaggaaaatgatcactgtaaagataactgttacagaactccatgatgccagcagaacaggcagcaggtgaggattatagtacccgacgctctgtattttctaagcaggagactgtttacttcccaagacttacgagctgtttgtatgcagccgcaggaactccactagtccctgcctaagcacgctgtcatgcatgaggctaaaataggcctggagcatacaagtcttctctcgccatttatctcagctctttctcttgtcaccacccaaagtggttttaactagagtggtgcctaataaatgtggggagcaggcagggggaggtgacagaccaaaataaatcacctgtgtggagcaactcaattcagaggcgttcacagaagaactggaggcggttaggatagggaaagacgtggttcattggcagactgcatctgttttcggtaatcctccgttacaaacagttcggttaatccaaattcctgaaatcaacatgccagcaataaatggtataacagtggcagagatgtactttaacaaagtctaaaaaaaaaatttattttcaaaaaaattttgcttttttctttcatattgctttataaagattgtttacaaattagcagtatccaaaattctagttaagatctatttatacaaacacttcacatttacagataagtttcagcagaaatgtatcttgacaaagtatggaaaagttaatttgaggcttcaatttcattttcttcatttctttttaaagtagactctttgtgaagaaacgagccagtgactgaaacaccctggtggaaacctgttgacagaccttccactttctcttcagaataagtagctgtggtggatattattatttgaagaaagaaaaaacagattttagggtggaaaaaacagtcaactcacacaaagaatggaaaaaaatactgagttaaattaagcaaataccttttacaagtgaaaggaagaatttttcttctgccgtcaataaaaccattgtgctattattgttttact

SEQ ID NO: 483 - DNA, 2872 bp, Homo sapiens
ataaaccgtacgtacagaggaacagatgagtgcactgtggaatgggagggagagttactttcctaaagtggacttggaaagatggtaaggaaaaggctttctagcacagagctgctggagatgacacagggaagcgcttattgttttgcagaacctacacaagatctatatggttcgtgaaagatgtggatttgattttgtgaataaagtttttgatcagtagagggatataatcacaactgtgctttgaagaagcccctcctgattttaaaggcacttgtgttattatacaccccattttacagacggagtttcactcttgttgcccaggctagagtgcaatggcgcgatcttggttcgtcgcaacctccacctcccaggttctcctgcctcagcctcccaagtatctttcagatgaaggcattgaagcttgcacaagctctccagacaaagtcaatgtaaatgacatcatcctgattgctctcaatacagatctgagaacaattggcaagaaattcctccccagtgacatcaatagtggaaaggtagaaaagctcgaaggtccatgtgttttgcaaattcaaaaaattcgcaatgttgctgcaccaaaggataatgaagaatctcaggctgcaccaaggatgctgcgattacagatgactgatggtcatataagttgcacagcagtagaatttagttatatgtcaaaaataagcctgaacacaccacctggaactaaagttaagctctcaggcattgttgacataaaaaatggattcctgctcttgaatgactctaacaccacagttcttggtggtgaagtggaacaccttattgagaaatgggagttacagagaagcttatcaaaacacaatagaagcaatattggaactgaaggtggaccaccgccttttgtgccttttggacagaagtgtgtatctcatgtccaagtggatagcagagaacttgatcgaagaaaaacattgcaagttacaatgcctgtcaaacctacaaatgataatgatgaatttgaaaagcaaaggacggctgctattgctgaagttgcaaagagcaaggaaaccaagacatttggaggaggtggtggtggtgctagaagtaatctcaatatgaatgctgctggtaaccgaaatagggaagttttacagaaagaaaagtcaaccaaatcagagggaaaacatgaaggtgtctatagagaactggttgatgagaaagctctgaagcacataacggaaatgggcttcagtaaggaagcatcgaggcaagctcttatggataatggcaacaacttagaagcagcactgaacgtacttcttacaagcaataaacagaaacctgttatgggtcctcctctgagaggtagaggaaaaggcagggggcgaataagatctgaagatgaagaggacctgggaaatgcaaggccatcagcaccaagcacattatttgatttcttggaatctaaaatgggaactttgaatgtggaagaacctaaatcacagccacagcagcttcatcagggacaatacagatcatcaaatactgagcaaaatggagtaaaagataataatcatctgagacatcctcctcgaaatgataccaggcagccaagaaatgaaaaaccgcctcgttttcaaagagactcccaaaattcaaagtcagttttagaaggcagtggattacctagaaatagaggttctgaaagaccaagtacttcttcagtatctgaagtatgggctgaagacagaatcaaatgtgatagaccgtattctagatatgacagaactaaagatacttcatatcctttaggttctcagcatagtgatggtgcttttaaaaaaagagataactctatgcaaagcagatcaggaaaaggtccctcctttgcagaggcaaaagaaaatccacttcctcaaggatctgtagattataataatcaaaaacgtggaaaaagagaaagccaaacatctattcctgattatttttatgacaggaaatcacaaacaataaataatgaagctttcagtggtataaaaattgaaaaacattttaatgtaaatactgattatcagaatccagttcgaagtaatagtttcattggtgttccaaatggagaagtagaaatgccactgaaaggaagacgaataggacctattaagccagcaggacctgtcacagctgtaccctgtgatgataaaatattttacaatagtgggcccaaacgaagatctgggccaattaagccagaaaaaatactagaatcatctattcctatggagtatgcaaaaatgtggaaacctggagatgaatgttttgcactttattgggaagacaacaagttttaccgggcagaagttgaagccctccattcttcgggtatgacagcagttgttaaattcattgactacggaaactatgaagaggtgctactgagcaatatcaagcccattcaaacagaggcatgggaggaagaaggcacctacgatcaaactctggagttccgtaggggaggtgatggccagccaagacgatccactcggccaacccaacagttttaccaaccaccccgggctcggaactaataggaaaagactctttgtgaagaaacgagccagtgactgaaacaccctggtggaaacctgttgacagaccttccactttctcttcagaataagtagctgtggtggatattattatttgaagaaagaaaaaacagattttagggtggaaaaaacagtcaactcacacaaagaatggaaaaaaatactgagttaaattaagcaaataccttttacaagtgaaaggaagaatttttcttctgccgtcaataaaaccattgtgctattattgttttact

SEQ ID NO: 484 - protein, 743 aa, Homo sapiens
MARSWFVATSTSQVLLPQPPKYLSDEGIEACTSSPDKVNVNDIILIALNTDLRTIGKKFLPSDINSGKVEKLEGPCVLQIQKIRNVAAPKDNEESQAAPRMLRLQMTDGHCTAVEFSYMSKISLNTPPGTKVKLSGIVDIKNGFLLLNDSNTTVLGGEVEHLIEKWELQRSLSKHNRSNIGTEGGPPPFVPFGQKCVSHVQVDSRELDRRKTLQVTMPVKPTNDNDEFEKQRTAAIAEVAKSKETKTFGGGGGGARSNLNMNAAGNRNREVLQKEKSTKSEGKHEGVYRELVDEKALKHITEMGFSKEASRQALMDNGNNLEAALNVLLTSNKQKPVMGPPLRGRGKGRGRIRSEDEEDLGNARPSAPSTLFDFLESKMGTLNVEEPKSQPQQLHQGQYRSSNTEQNGVKDNNHLRHPPRNDTRQPRNEKPPRFQRDSQNSKSVLEGSGLPRNRGSPSTSSVSEVWAEDRIKCDRPYSRYDRTKDTSYPLGSQHSDGAFKKRDNSMQSRSGKGPSFAEAKENPLPQGSVDYNNQKRGKRESQTSIPDYFYDRKSQTINNEAFSGIKIEKHFNVNTDYQNPVRSNSFIGVPNGEVEMPLKGRRIGPIKPAGPVTAVPCDDKIFYNSGPKRRSGPIKPEKISSIPMEYAKMWKPGDECFALYWEDNKFYRAEVEALHSSGMTAVVKFIDYGNYEEVLLSNIKPIQTEAWEEEGTYDQTLEFRRGGDGQPRRSWTQQFYQPPRARN

SEQ ID NO: 485 - DNA, 3012 bp, Homo sapiens
cgccccagccctctacagcgcgggcgaagggcatcggcggggaagcggctgtggttgccagatctggcagtacagagccaaggtggcagggccgcgctaggacacggatggtcccagggggagggcaacaggaaaaacaagcactgacacaactgccccatttccccatgtcccctaaaagcaggttttcttgggctgaccagggcattttcactgtggtgtccgactggggcaactcgatctgcccgcggggactcaaaaaagcttgagctgcattttttctttgcgtccgggcggaccaaaaggcgaggtgaagggaacgagtgtttataagaaagtaaacttttgtgcagaatgggctggggacacctctgagttttgctgcccgcaacgtgacctttttagcgcggtcctggacgcgttccctcgcagccaacccgtcagtctcctcaggccttatcctgccctctctgaggtggccgcctgtgggcgctgcaaacgccacacttttgctctacgaagaacctcctcgcgactttccaaggtatctttcagatgaaggcattgaagcttgcacaagctctccagacaaagtcaatgtaaatgacatcatcctgattgctctcaatatctgagaacaattggcaagaaattcctccccagtgacatcaatagtggaaaggtagaaaagctcgaaggtccatgtgttttgcaaattcaaaaaattcgcaatgttgctgcaccaaaggataatgaagaatctcaggctgcaccaaggatgctgcgattacagatgactgatggtcatataagttgcacagcagtagaatttagttatatgtcaaaaataagcctgaacacaccacctggaactaaagttaagctctcaggcattgttgacataaaaaatggattcctgctcttgaatgactctaacaccacagttcttggtggtgaagtggaacaccttattgagaaatgggagttacagagaagcttatcaaaacacaatagaagcaatattggaactgaaggtggaccaccgccttttgtgccttttggacagaagtgtgtatctcatgtccaagtggatagcagagaacttgatcgaagaaaaacattgcaagttacaatgcctgtcaaacctacaaatgataatgatgaatttgaaaagcaaaggacggctgctattgctgaagttgcaaagagcaaggaaaccaagacatttggaggaggtggtggtggtgctagaagtaatctcaatatgaatgctgctggtaaccgaaatagggaagttttacagaaagaaaagtcaaccaaatcagagggaaaacatgaaggtgtctatagagaactggttgatgagaaagctctgaagcacataacggaaatgggcttcagtaaggaagcatcgaggcaagctcttatggataatggcaacaacttagaagcagcactgaacgtacttcttacaagcaataaacagaaacctgttatgggtcctcctctgagaggtagaggaaaaggcagggggcgaataagatctgaagatgaagaggacctgggaaatgcaaggccatcagcaccaagcacattatttgatttcttggaatctaaaatgggaactttgaatgtggaagaacctaaatcacagccacagcagcttcatcagggacaatacagatcatcaaatactgagcaaaatggagtaaaagataataatcatctgagacatcctcctcgaaatgataccaggcagccaagaaatgaaaaaccgcctcgttttcaaagagactcccaaaattcaaagtcagttttagaaggcagtggattacctagaaatagaggttctgaaagaccaagtacttcttcagtatctgaagtatgggctgaagacagaatcaaatgtgatagaccgtattctagatatgacagaactaaagatacttcatatcctttaggttctcagcatagtgatggtgcttttaaaaaaagagataactctatgcaaagcagatcaggaaaaggtccctcctttgcagaggcaaaagaaaatccacttcctcaaggatctgtagattataataatcaaaaacgtggaaaaagagaaagccaaacatctattcctgattatttttatgacaggaaatcacaaacaataaataatgaagctttcagtggtataaaaattgaaaaacattttaatgtaaatactgattatcagaatccagttcgaagtaatagtttcattggtgttccaaatggagaagtagaaatgccactgaaaggaagacgaataggacctattaagccagcaggacctgtcacagctgtaccctgtgatgataaaatattttacaatagtgggcccaaacgaagatctgggccaattaagccagaaaaaatactagaatcatctattcctatggagtatgcaaaaatgtggaaacctggagatgaatgttttgcactttattgggaagacaacaagttttaccgggcagaagttgaagccctccattcttcgggtatgacagcagttgttaaattcattgactacggaaactatgaagaggtgctactgagcaatatcaagcccattcaaacagaggcatgggaggaagaaggcacctacgatcaaactctggagttccgtaggggaggtgatggccagccaagacgatccactcggccaacccaacagttttaccaaccaccccgggctcggaactaataggaaaagtagactctttgtgaagaaacgagccagtgactgaaacaccctggtggaaacctgttgacagaccttccactttctcttcagaataagtagctgtggtggatattattatttgaagaaagaaaaaacagattttagggtggaaaaaacagtcaactcacacaaagaatggaaaaaaatactgagttaaattaagcaaataccttttacaagtgaaaggaagaatttttcttctgccgtcaataaaaccattgtgctattattgttttact

SEQ ID NO: 486 - protein, 643 aa, Homo sapiens
MLRLQMTDGHCTAVEFSYMSKISLNTPPGTKVKLSGIVDIKNGFLLLNDSNTTVLGGEVEHLIEKWELQRSLSKHNRSNIGTEGGPPPFVPFGQKCVSHVQVDSRELDRRKTLQVTMPVKPTNDNDEFEKQRTAAIAEVAKSKETKTFGGGGGGARSNLNMNAAGNRNREVLQKEKSTKSEGKHEGVYRELVDEKALKHITEMGFSKEASRQALMDNGNNLEAALNVLLTSNKQKPVMGPPLRGRGKGRGRIRSEDEEDLGNARPSAPSTLFDFLESKMGTLNVEEPKSQPQQLHQGQYRSSNTEQNGVKDNNHLRHPPRNDTRQPRNEKPPRFQRDSQNSKSVLEGSGLPRNRGSPSTSSVSEVWAEDRIKCDRPYSRYDRTKDTSYPLGSQHSDGAFKKRDNSMQSRSGKGPSFAEAKENPLPQGSVDYNNQKRGKRESQTSIPDYFYDRKSQTINNEAFSGIKIEKHFNVNTDYQNPVRSNSFIGVPNGEVEMPLKGRRIGPIKPAGPVTAVPCDDKIFYNSGPKRRSGPIKPEKISSIPMEYAKMWKPGDECFALYWEDNKFYRAEVEALHSSGMTAVVKFIDYGNYEEVLLSNIKPIQTEAWEEEGTYDQTLEFRRGGDGQPRRSWTQQFYQPPRARN

SEQ ID NO: 487 - DNA, 3009 bp, Homo sapiens
cgccccagccctctacagcgcgggcgaagggcatcggcggggaagcggctgtggttgccagatctggcagtacagagccaaggtggcagggccgcgctaggacacggatggtcccagggggagggcaacaggaaaaacaagcactgacacaactgccccatttccccatgtcccctaaaagcaggttttcttgggctgaccagggcattttcactgtggtgtccgactggggcaactcgatctgcccgcggggactcaaaaaagcttgagctgcattttttctttgcgtccgggcggaccaaaaggcgaggtgaagggaacgagtgtttataagaaagtaaacttttgtgcagaatgggctggggacacctctgagttttgctgcccgcaacgtgacctttttagcgcggtcctggacgcgttccctcgcagccaacccgtcagtctcctcaggccttatcctgccctctctgaggtggccgcctgtgggcgctgcaaacgccacacttttgctctacgaagaacctcctcgcgactttccaaggtatctttcagatgaaggcattgaagcttgcacaagctctccagacaaagtcaatgtaaatgacatcatcctgattgctctcaatatctgagaacaattggcaagaaattcctccccagtgacatcaatagtggaaaggtagaaaagctcgaaggtccatgtgttttgcaaattcaaaaaattcgcaatgttgctgcaccaaaggataatgaagaatctcaggctgcaccaaggatgctgcgattacagatgactgatggtcatataagttgcacagcagtagaatttagttatatgtcaaaaataagcctgaacacaccacctggaactaaagttaagctctcaggcattgttgacataaaaaatggattcctgctcttgaatgactctaacaccacagttcttggtggtgaagtggaacaccttattgagaaatgggagttacagagaagcttatcaaaacacaatagaagcaatattggaactgaaggtggaccaccgccttttgtgccttttggacagaagtgtgtatctcatgtccaagtggatagcagagaacttgatcgaagaaaaacattgcaagttacaatgcctgtcaaacctacaaatgataatgatgaatttgaaaagcaaaggacggctgctattgctgaagttgcaaagagcaaggaaaccaagacatttggaggaggtggtggtggtgctagaagtaatctcaatatgaatgctgctggtaaccgaaatagggaagttttacagaaagaaaagtcaaccaaatcagagggaaaacatgaaggtgtctatagagaactggttgatgagaaagctctgaagcacataacggaaatgggcttcagtaaggaagcatcgaggcaagctcttatggataatggcaacaacttagaagcagcactgaacgtacttcttacaagcaataaacagaaacctgttatgggtcctcctctgagaggtagaggaaaaggcagggggcgaataagatctgaagatgaagaggacctgggaaatgcaaggccatcagcaccaagcacattatttgatttcttggaatctaaaatgggaactttgaatgtggaagaacctaaatcacagccacagcagcttcatcagggacaatacagatcatcaaatactgagcaaaatggagtaaaagataataatcatctgagacatcctcctcgaaatgataccaggcagccaagaaatgaaaaaccgcctcgttttcaaagagactcccaaaattcaaagtcagttttagaaggcagtggattacctagaaatagaggttctgaaagaccaagtacttcttcagtatctgaagtatgggctgaagacagaatcaaatgtgatagaccgtattctagatatgacagaactaaagatacttcatatcctttaggttctcagcatagtgatggtgcttttaaaaaaagagataactctatgcaaagcagatcaggaaaaggtccctcctttgcagaggcaaaagaaaatccacttcctcaaggatctgtagattataataatcaaaaacgtggaaaaagagaaagccaaacatctattcctgattatttttatgacaggaaatcacaaacaataaataatgaagctttcagtggtataaaaattgaaaaacattttaatgtaaatactgattatcagaatccagttcgaagtaatagtttcattggtgttccaaatggagaagtagaaatgccactgaaaggaagacgaataggacctattaagccagcaggacctgtcacagctgtaccctgtgatgataaaatattttacaatagtgggcccaaacgaagatctgggccaattaagccagaaaaaatactagaatcatctattcctatggagtatgcaaaaatgtggaaacctggagatgaatgttttgcactttattgggaagacaacaagttttaccgggcagaagttgaagccctccattcttcgggtatgacagcagttgttaaattcattgactacggaaactatgaagaggtgctactgagcaatatcaagcccattcaaacagaggcatgggaggaagaaggcacctacgatcaaactctggagttccgtaggggaggtgatggccagccaagacgatccactcggccaacccaacagttttaccaaccaccccgggctcggaactaataggaaaagactctttgtgaagaaacgagccagtgactgaaacaccctggtggaaacctgttgacagaccttccactttctcttcagaataagtagctgtggtggatattattatttgaagaaagaaaaaacagattttagggtggaaaaaacagtcaactcacacaaagaatggaaaaaaatactgagttaaattaagcaaataccttttacaagtgaaaggaagaatttttcttctgccgtcaataaaaccattgtgctattattgttttact

SEQ ID NO: 488 - protein, 643 aa, Homo sapiens; identical to SEQ ID NO: 486

SEQ ID NO: 489 - DNA, 3013 bp, Homo sapiens
cgccccagccctctacagcgcgggcgaagggcatcggcggggaagcggctgtggttgccagatctggcagtacagagccaaggtggcagggccgcgctaggacacggatggtcccagggggagggcaacaggaaaaacaagcactgacacaactgccccatttccccatgtcccctaaaagcaggttttcttgggctgaccagggcattttcactgtggtgtccgactggggcaactcgatctgcccgcggggactcaaaaaagcttgagctgcattttttctttgcgtccgggcggaccaaaaggcgaggtgaagggaacgagtgtttataagaaagtaaacttttgtgcagaatgggctggggacacctctgagttttgctgcccgcaacgtgacctttttagcgcggtcctggacgcgttccctcgcagccaacccgtcagtctcctcaggccttatcctgccctctctgaggtggccgcctgtgggcgctgcaaacgccacacttttgctctacgaagaacctcctcgcgactttccaaggtatctttcagatgaaggcattgaagcttgcacaagctctccagacaaagtcaatgtaaatgacatcatcctgattgctctcaatacagatctgagaacaattggcaagaaattcctccccagtgacatcaatagtggaaaggtagaaaagctcgaaggtccatgtgttttgcaaattcaaaaaattcgcaatgttgctgcaccaaaggataatgaagaatctcaggctgcaccaaggatgctgcgattacagatgactgatggtcatataagttgcacagcagtagaatttagttatatgtcaaaaataagcctgaacacaccacctggaactaaagttaagctctcaggcattgttgacataaaaaatggattcctgctcttgaatgactctaacaccacagttcttggtggtgaagtggaacaccttattgagaaatgggagttacagagaagcttatcaaaacacaatagaagcaatattggaactgaaggtggaccaccgccttttgtgccttttggacagaagtgtgtatctcatgtccaagtggatagcagagaacttgatcgaagaaaaacattgcaagttacaatgcctgtcaaacctacaaatgataatgatgaatttgaaaagcaaaggacggctgctattgctgaagttgcaaagagcaaggaaaccaagacatttggaggaggtggtggtggtgctagaagtaatctcaatatgaatgctgctggtaaccgaaatagggaagttttacagaaagaaaagtcaaccaaatcagagggaaaacatgaaggtgtctatagagaactggttgatgagaaagctctgaagcacataacggaaatgggcttcagtaaggaagcatcgaggcaagctcttatggataatggcaacaacttagaagcagcactgaacgtacttcttacaagcaataaacagaaacctgttatgggtcctcctctgagaggtagaggaaaaggcagggggcgaataagatctgaagatgaagaggacctgggaaatgcaaggccatcagcaccaagcacattatttgatttcttggaatctaaaatgggaactttgaatgtggaagaacctaaatcacagccacagcagcttcatcagggacaatacagatcatcaaatactgagcaaaatggagtaaaagataataatcatctgagacatcctcctcgaaatgataccaggcagccaagaaatgaaaaaccgcctcgttttcaaagagactcccaaaattcaaagtcagttttagaaggcagtggattacctagaaatagaggttctgaaagaccaagtacttcttcagtatctgaagtatgggctgaagacagaatcaaatgtgatagaccgtattctagatatgacagaactaaagatacttcatatcctttaggttctcagcatagtgatggtgcttttaaaaaaagagataactctatgcaaagcagatcaggaaaaggtccctcctttgcagaggcaaaagaaaatccacttcctcaaggatctgtagattataataatcaaaaacgtggaaaaagagaaagccaaacatctattcctgattatttttatgacaggaaatcacaaacaataaataatgaagctttcagtggtataaaaattgaaaaacattttaatgtaaatactgattatcagaatccagttcgaagtaatagtttcattggtgttccaaatggagaagtagaaatgccactgaaaggaagacgaataggacctattaagccagcaggacctgtcacagctgtaccctgtgatgataaaatattttacaatagtgggcccaaacgaagatctgggccaattaagccagaaaaaatactagaatcatctattcctatggagtatgcaaaaatgtggaaacctggagatgaatgttttgcactttattgggaagacaacaagttttaccgggcagaagttgaagccctccattcttcgggtatgacagcagttgttaaattcattgactacggaaactatgaagaggtgctactgagcaatatcaagcccattcaaacagaggcatgggaggaagaaggcacctacgatcaaactctggagttccgtaggggaggtgatggccagccaagacgatccactcggccaacccaacagttttaccaaccaccccgggctcggaactaataggaaaagactctttgtgaagaaacgagccagtgactgaaacaccctggtggaaacctgttgacagaccttccactttctcttcagaataagtagctgtggtggatattattatttgaagaaagaaaaaacagattttagggtggaaaaaacagtcaactcacacaaagaatggaaaaaaatactgagttaaattaagcaaataccttttacaagtgaaaggaagaatttttcttctgccgtcaataaaaccattgtgctattattgttttact

SEQ ID NO: 490 - protein, 643 aa, Homo sapiens; identical to SEQ ID NO: 486

SEQ ID NO: 491 - DNA, 2465 bp, Homo sapiens
gtatctttcagatgaaggcattgaagcttgcacaagctctccagacaaagtcaatgtaaatgacatcatcctgattgctctcaatatctgagaacaattggcaagaaattcctccccagtgacatcaatagtggaaaggtagaaaagctcgaaggtccatgtgttttgcaaattcaaaaaattcgcaatgttgctgcaccaaaggataatgaagaatctcaggctgcaccaaggatgctgcgattacagatgactgatggtcatataagttgcacagcagtagaatttagttatatgtcaaaaataagcctgaacacaccacctggaactaaagttaagctctcaggcattgttgacataaaaaatggattcctgctcttgaatgactctaacaccacagttcttggtggtgaagtggaacaccttattgagaaatgggagttacagagaagcttatcaaaacacaatagaagcaatattggaactgaaggtggaccaccgccttttgtgccttttggacagaagtgtgtatctcatgtccaagtggatagcagagaacttgatcgaagaaaaacattgcaagttacaatgcctgtcaaacctacaaatgataatgatgaatttgaaaagcaaaggacggctgctattgctgaagttgcaaagagcaaggaaaccaagacatttggaggaggtggtggtggtgctagaagtaatctcaatatgaatgctgctggtaaccgaaatagggaagttttacagaaagaaaagtcaaccaaatcagagggaaaacatgaaggtgtctatagagaactggttgatgagaaagctctgaagcacataacggaaatgggcttcagtaaggaagcatcgaggcaagctcttatggataatggcaacaacttagaagcagcactgaacgtacttcttacaagcaataaacagaaacctgttatgggtcctcctctgagaggtagaggaaaaggcagggggcgaataagatctgaagatgaagaggacctgggaaatgcaaggccatcagcaccaagcacattatttgatttcttggaatctaaaatgggaactttgaatgtggaagaacctaaatcacagccacagcagcttcatcagggacaatacagatcatcaaatactgagcaaaatggagtaaaagataataatcatctgagacatcctcctcgaaatgataccaggcagccaagaaatgaaaaaccgcctcgttttcaaagagactcccaaaattcaaagtcagttttagaaggcagtggattacctagaaatagaggttctgaaagaccaagtacttcttcagtatctgaagtatgggctgaagacagaatcaaatgtgatagaccgtattctagatatgacagaactaaagatacttcatatcctttaggttctcagcatagtgatggtgcttttaaaaaaagagataactctatgcaaagcagatcaggaaaaggtccctcctttgcagaggcaaaagaaaatccacttcctcaaggatctgtagattataataatcaaaaacgtggaaaaagagaaagccaaacatctattcctgattatttttatgacaggaaatcacaaacaataaataatgaagctttcagtggtataaaaattgaaaaacattttaatgtaaatactgattatcagaatccagttcgaagtaatagtttcattggtgttccaaatggagaagtagaaatgccactgaaaggaagacgaataggacctattaagccagcaggacctgtcacagctgtaccctgtgatgataaaatattttacaatagtgggcccaaacgaagatctgggccaattaagccagaaaaaatactagaatcatctattcctatggagtatgcaaaaatgtggaaacctggagatgaatgttttgcactttattgggaagacaacaagttttaccgggcagaagttgaagccctccattcttcgggtatgacagcagttgttaaattcattgactacggaaactatgaagaggtgctactgagcaatatcaagcccattcaaacagaggcatgggaggaagaaggcacctacgatcaaactctggagttccgtaggggaggtgatggccagccaagacgatccactcggccaacccaacagttttaccaaccaccccgggctcggaactaataggaaaagactctttgtgaagaaacgagccagtgactgaaacaccctggtggaaacctgttgacagaccttccactttctcttcagaataagtagctgtggtggatattattatttgaagaaagaaaaaacagattttagggtggaaaaaacagtcaactcacacaaagaatggaaaaaaatactgagttaaattaagcaaataccttttacaagtgaaaggaagaatttttcttctgccgtcaataaaaccattgtgctattattgttttact

SEQ ID NO: 492 - protein, 643 aa, Homo sapiens; identical to SEQ ID NO: 486

SEQ ID NO: 493 - DNA, 379973 bp, Mus musculus
  misc_feature (1)...(379973): n = A,T,C or G
cgctcgcccctcctgcgctcgctctttcttaacctcacctcctttttctcctcttctctccctctctccaactaaggttccttcctagagtgcttgttgtctctgcccccccccccacctcgatccttgtccccctttctcccccttcccctttggggggtgtgtggcaacttttccccctcgcttctcctccttctgtttccccttatatgtgaccatggcagtgccggcggctttgatccctccgacccagctggtcccccctcaacccccgatctctacttctgcttcctcctcgggcaccaccacctccacctcctcggcgacctcgtctccggctccatccatcggacccccggcgtcgtctgggccaactctgttccggccggagcccattgcctcttctgcttcttcttcagccgcggccacagtcacctctcctggtggcggcggcggcggcagcggaggcggcggtggcagcggcggcaacggaggcggcggcgggagcaactgcaaccccagcctggcggccgggagcagcggcggcggcgttagcgctggcggcggcggcgcctccagcacccccatcaccgcgagcaccggcagcagcagcagtagcagnnnnnnnnnnnnnnnnnnnncagcagcagcagtagcagcagcagcagcagtagcagcagcagcagcagtagcagcagcagctgcggccccctccctgggaaacccgtgtactcaaccccgtccccagtggaaaacaccccccagaataatgagtgcaaaaatggtggatctgagaggggccaaagtggcttcctttacggtggagggctgcgagctgatctgcctgccccaggctttcgacctgttcctgaagcacttggtggggggcttgcacaccgtctacaccaagctgaagcggttggagatcacgccggtggtgtgcaatgtggaacaggttcgcatcctgaggggactgggggccatccagcccggagtgaaccgctgcaaactcatctccaggaaggacttcgagaccctctacaatgactgcaccaacgccaggtaaagagcggaggggaaaccttctgtcgccctggtcctttcccaccctcctcctcgcccttcccctgctcccttcccggcgccgcccgctcagcgcgtccgcgagctgcgcgccctggcgagcacggccctctcctgtcggtccccggggctagtctccttcgcccgacctcctgggcaagttcgcactgctcgcggcctgatccgtgccggccgggtgttcctgatgcttcctagggcattcgggctaggctgccgctgagcttgggatgcagagtggggaaccagaggaaggtgccttcccaggagtcacagccccttcccgggcgcgctggtgacctgcacccgttccggacactactgcctgagtgtgcactcctgggacctgggttcctccaagaagcctctgggcacctctgggataggagggaggtcgtgaccctgatcctgcagggctccgaagctgagggatgcgctctgggataggggggctcctctagtaagaaaagagggtgggctggcagctgagagcggcgctgagaagtcagcaccggaacagtaccgggcgctgagaggagcaggggtaatctgagagttcaaccaaagagttcagccccacatcccagagggaagcctgtgtaggggaggggtttgtgtgtgcgcggatgtgtgtgtttgtgtctccctatctgtgtgtgtgtgtgtgtgtgtgtgtgtgcgtgtgtgtacgcgcgcgcgcgcacgcgctcgtgaaaagaaaaaaagaagtacgtttgccccggggcaaatgcgagggcacaaacacgttttgttctttaggagatgacctggtgccccagactcttggaagctgaattggagaggtggggaagaaaagaaagggacttgctcgccctcttttcaaagtgcgatttaccagtcttcgctctttctttttcttttttctttccactttcttttctgagtttagtagctcaggaaaggtgcaggtgtgccttttgccacaggatgctaagggcttgaatacttctcgcctagtcttccttgtaaagcatgtgcgccgaggtggccttgggacagtccctgacccaaccagttttatgctaatgaacgctcactgggggaggatctaccgagagggggcgggagtggggcaacttgtcagtttcggggtagaaatgatccagctgctggcagagggataagttcagaggttctgagagaaagaaagtagagaaagttggagatcataagtaggcacttgggaactgggagaaaagattcatacacacacacacacacacacacacacacacacacacatgcacatacgcacactttggtacctttaaaataagcttaatggtgaggggaaaaagcagaggctcttaacagagctaaggaaactggacaggagaggtgagaaaccagacccaaagccaccagcaatttctttgagactattcctctgtagggcctgggaagagaaaggaaaagaccagaactccatcccaacttaactgacctagctagcaattcctttctgtgtttatttgatgttttgatgttcctgtcttgacctcttatttcagctgtggtgtgtgtgtgtgtgtgtgtgtgtgtgtcctgctcgcacatacgtgcgcgcacacatgcttctactggatccggtgggtggccagatggcattgggcacgggtgggcatgctgattgctaaatgccatttagtcagataactgtcattcttggttgtccagaagataacatatttgtccaaaacctgtcgtaaaaactaccagaagcacccaggacattgttgtagagtcatgaacaatgcacagtaaaactggaagtcagttcagacacttgtgttgctggctgtcacactgactctgtgacaaattgagatgcagctttcctcttcactaacgaaatgcctgctcttctcccaatatccattgtgtttctcgtgctgaataatcaacagtcattttacatatgtgcaggcacacactgacatgagcacacacacacacacacacacacacacacacacacacacacaccctgtgaggaactccttacagtggctctgtgatgttatgataccaagactttaaatggtagttttagtcatatagtcggaggatagtcttaaagttactttaaaaaaaaaagttttctttttactttctttcctcctctttccggtccctccaaccatcatccttttcttcctttgtccatttttccttcccagaggttcctaacagttctggagtcttaagttccaaggccaaagatcacttaaactcagtagaattgtgtatccctttaaaaatacgtcatctgcaccctaattatatttcatttggccttaatattttgtgattaaatgttttgttctaacatcctacttcaagctattcttaggcagggaaagtgctgactgactatcacattttgattttatatatcaactagagagccttttacacttaaatccatggaaattctgctagttattctgagaagatttgaatatacacctacataggttctcccaacacagccataggccaggaaatggaactttgcatttgaactttctctcaccaaaaatatacaaattgcatgttaccatattagcaatttaatactaattataagggttatcttttccggtctttattttgaaagcaatagctggaatactttgttctttgaacttgcaaactatttttattttcatttaaacctggtttatgctttggtgttaagattttgtttttattaatctagattagagtgacatctttcaccctagtttctttcaattctgggtatttaacagaccaagggaaaatttgttcattgtattactgaaaatatataagtaataacatttctcatatatgattcgttatatagataaacatagtgtcttgtgtacatattatgtgctgtgtagcagtgggtgtctgtgatattaaattttagtattctcagtattataggagatatatatatatatatatatctatgaggactcagcaatatttacatttcagggaattttaggaaactaaaaagtgatgctaaaggaaaaaaacattaataaacaatttgagagtgactcaggaaggtagcaaatcctaaagtcgatttaatttgcttggggctattgaattagtatgctctctatgaaaattagagtaaatgtggaagccatctgtcattacctctaggagaagaaaaaggcactgtcaccttctagatagtaaacctaaatataatacaggtctcaaaacatgaaagaacatctaaggaaacccatttcaaagttgttgaaagacaaagtctgaccttggtcagtttcctacaattattattttaaaactaaacattagttgtctgaacttggctgttgcagcggaggtcagttaattaactgctaaccattaaataacaacaacagcaacaacaaaaagtcattatgtccatggtcaagtttgtttgtgtcagtcaattgcttgtttgcagatttggattaaagtttgatttttctgtgaattcatggaatgaaaagtgagtcttacatttgttctgaaatgcttgttttcttgattattggaagaagacgatatttctgtttttttttttaaaaaccagactatgacttggcttctgtgtagcctgagatttccaaagtttttcatttaaacagactacctcattcaatcctttacatgtatacacatagattcataaacagcattcttttgtctttaaagtggatgctatccatggacataaattggaagatatgccaagccttttatgtttcagggtcatatctgaatacagttttactgtaagaactgtagctttcccagtaattctttgctttatttttcttgtcaagggtttttaataaagataggatgttggggcagtatttatttaacattttcttcgttgtctgctttgcattgacatgggactttcaacacaaatccagattccctcactcctgacaggcactcatgatgtctggctcagagacattcaggaattatttcatgtgaagaaactatgctttggaagtgtttgtgctatggtagattaacaattcctataaaaccaagtgcctcattttataacatttcaaacagaaagtgacatgattagatgaccaagtcataaaatatggaagctagtttggatttataacttatttctttctggtttacaaatgttagaaaattatagcttaattactaatatattaatgagagatgagactatcaccttgtagtatagactataagtatttgagttatgtagctaatatttgttaagatgttccttgcagttaatttcaaatataattattgtcaaaaatgtgcatggttataaattgttttacttttagaaaaatacgtttagtaaacattatgatgaaataaacttaatttttataaataatattttattttgttagcttcaaatattttctccatgcgcagtttccttacacatgcccagtttctttatacaaatttatttgatacagaaatatacaaatatatttgaaacagatattttaaaaaatcacctctctattactcattgcttgcttttttgttttgttttgtttttaatctactgcatttcatgggagttgcatgtaaattagtgagacaaatattagacacctctttttcctcacttcccttgtcccctgggatgtgacacccaatattgattaaagtcttggcagggtttgagcataaatcattcctttctttgacgatttactacatgtgattgaccaacacacaaaaacataatatggtttattgtttctcatttgatgtttgtttctggaatgtaagtagtatttgcaaattaggttaatttgccaccaagtagttgtcattttaagaacacaaggtgatttgactatcaatcagtattacattaccttctcaagatgttttattcaattgtttcctacaactgtctttgtcaattaagtaaaatagttactttaatagcattgtctcagctacacaaaatacatctattgcaaaatccactagcaaatagaactctcacaggttgcaagttgtctccttttgaatctctgcatgaagaaagcagtttaaaacatgccttctgagtaggcacaggtgagtcttctgcttttcattaaatatttgattgtaagtgtattttaggttctttgctacatttcgagtttgtctgaattgtatttttcaaggttatcattttcaggctgccaacctaaaaatgtcatagggagttatgtgctttggaaatggtaggaaacatgaagttgataataagtatctgagtgtttaaatggggttcgttccaggtttcaacatggtacatttaaattgttataaagactggaatgaggctgtcattgctaagcttggctagcaagtatcagtttctaatctgaggtagtgggttctaattgatcagtatgagatattgtgtataagaataaatgctttggtaagcactccaactaaaataatcgagacatgtttttttaatatttccagcctttgagattgcaccgagatgctctttttttggtgtatttgttgtgttcattgttgttcaaagtaggaaatactgaatttttaaaaagcacttaattgagcttagtagcttctagtagagaagtctctgttactaaactgatatatttatctcaaacctagcaaatctctctgcaaatccaaacctatataacattaaaactcatttacttgccttcaaaatttcctagaagtgttttagtcaaaatatttttatgacagaattgcttatttttttaaaaaagtgtattttattggctaacatttgtttttttaaagttatattgcatacagaaatgactgttagaatagtgtgatcagttaaaaaaattgttttggaaaccaaaaatatccagattaagatagttctaatttgttctaacaagttattattggattaacatacttaagacacacacacatacacacaaaattatttatttttttaaagagttctgatggtctgtgaagtgtctgttcattgctgctaagctgtaggcagtgagtgattaactttatgcagagtgtgtatttataagtacaagtctagtcatatgagaaaatgagtcaggttaacacatcaacctagtgaagggcttcaagccagatgcattgaaattgtcttggtatacactgatggatttctatgtaagaaatcaacatccttagtttactaaataagaaactcatctttagattggttggatactgtacttttcaatggatgaagtttgttaaaattgtattagtttggtaatctgatcacagatgacttattgttggtcaaatatttcaatataagattcttttgtgtttttaatcatatgagatttgattgcaggttgtaaagcacaactttttttaaatgacaaaactgactatgtcacttaattgctcttaattattatttatttattcttttcagtaatttttggtaaatgtctttggtaattttttttgtaatgaactattctaaagtatgcaacatggcaaaccattgatgtatagccagaaaaagttttaagagcaataagaagaagtagatggagaatagaaatctaaattcagaattaaaaactgtcattgtctggacagattacaatacctggaatacacccacacttcttggaagatgctaattgaaataagccaggcacaggaagacaattagttaacttatgtgtggaatctttaaatgttgagaatggagaagatgtcagatgggtgattaccaagggctgaaagggatgttggtcaaggctacatagttttagataggtaagaagagaaagttcaaaagaattgaattttcttttcttattttttttcctatttatttctacagcatggttcctacttgcaaaacgtctaaagtctgagagagaaatttgaaaacactgtatttatttgacaaaaaatgtatgtattattaaaacatgactttcacaaagtgaacattgaaataggcagtaggatccagattttatgagtcacagtggatgatgctatctttccttagtagaaatgaacaaagtaaatacaaagaaggaacaatacacaatgttgaattgtctttggctttatatagtatcaaatgcttctacatagttagattgctttttccagcacaataggaaaaatagtctcactcttatcaaggactatcaaattatatataaggaaatttggccagttgggaggaatacttaatagaaacatagaaacttctgggacaattacttcttaattcatgttaggacatagtggccatatattaacaaaaaagcaatgttactattaatcaagaaatattttattcacctggcatgtaaagtattttttaaaatcataaacaatattctgaacttttactagcaacaattaagagtctgtactattaatagtattattattctaaagacattccattgatgtgccaatcaaataaatgacttgaaggtgaaacctttgagttcattatagctttgatagaatcagctgatactttcaactctattcttatttcacaacttaaatctttaaactttgtttaaccttattctcagaaaggatatttcctgaggtagacatgtgttagcttgactcttgaactttaatagaatgacttaaaccactttcttattcatatcgccagacatgtatgttatattaggatacttacatgtgcaacaagtgtgaaaatgttaccaatagtttagtgatatctatgaacacttttatttatataaattgtatttcacttgataccaatgtatgaatgatgtaaataactttaatatatttagaagaaaatcttttaatatatgtacatgtgcatacatacttaacaactgttggaggtaggccaagggacagcgactttcactagaattatccttagtttgtttgttgacattcaataaagcataaaatacatttgcaaaaaatgatttactttacacaatgaaacaaaacttagttttagagtaaagaattaggaatctgcattcaaacattaaaaatgcaattaaaacatataagagtctatcagtattaggatagttactaaaatttaatgaatttcctgtgtttatttttatcataactacaaggtgatgttagttccataattagagtgtaccaatgagaattatttgtataaatagatattatatgatgaaatgccaaactctaggcatttctaagtagcactaagtgtgcttgatgctcttgcttcagtgtttctgttgctttacttagctcctttttgaactttagaggatgctcatcttttagaatcagtggatacattatgagaaaatagtttcgtaacctgaagagaagtagtttctgtaaaagctttgccatcagtgagctgctcaggaggaggtcaatgggttaatcttcatgtctacataaggagatgtgtattagcacttcttgcaccagactgtaattgtctttgaaaacacttggtaaagatccagataagttgaaatcaatcactttctcaatcattccatgacgcttgtcaagtcgttacatcagggctaaaagtgcaaggatgcatacaattttttgcaagataggaaaaatgcttatatacataccaacctcacacacacacacacacacacacacacacacacacacacaccttgtccatataaatatttcaacctcatctaatgactctagaattacaaaaggatacaacccaaatttgaacatagtagaaaaactttatgcccacctattttaaaggaagttctcatcttttatttggtaactcaaatagaaataaatatttgtaggctcacatttcgcatcacctggtgtgcaatatgtgaagagggggaaaaaaaacgataagtaatcaaagtggtttccaaataatctatggcttgattgctctgatgtgttcattcttaccttctaagagctctctgacaagtgagagggatggtcaaagatgattgtatgtccatttcactacttctcctttctgtcttcacgccattgacaggacatgcagatttgaacttgtagccaagaagagagcttccatgcttcaaattgcctaaagacccctagggatagaaacttgacctgcttttatgaaaccatagaattacatttatacaagttaccccatgggaaaacaatgaactgatcccaactcaaaccttaatattggagccttctgggtcagatttgatttgggagtgtggggtgtggggcagaacacctgtttgactactatattagggaatctgatatacttatgaaatttaaaaatatcattagtatgaaaattgaagctatttaagtttacctgtgttattatactgttaataaaataaaataaaataaaataaaataatcttttatatatgcttcctagctttaaggagcttgaacccaaatttatttaattagaatatgaatgcatttttaatacttaatttctctccagttgtcacctaacttaagttgaagaaaaatactttaaaggcagtttttccttgttgcaatctttgatcatatagatttttatatgagtatgtttcaatttccttagtgtcacattttatgattttattttgttttgagttgaaatgctcagtagagtttccagaggacctaattttatctccattagaaacaactgaacgtggtcactggacattggagcacagagaagctgattatattttagttagctttactgtgtagagtgggttaaagttggaaatctaaagttatgatttgttcatatgtgtatacatatatatatatatatagatagatatagatagataggtagatagatagatttagatatatagatagatagtgttaaatggtttccctagtgtcacaactactcaaacgttttactacatattcaaatgtatgattaatattaatgagtggagagtcataatctctttgcttatggatctacaccattgaatgccttcagagagatggaaggatgtttagttctcagatcgtttgacttactaacatctatatactaaaacacagttcataaatggtaccgcaaaacacaaacgctggcactatgagaatactttagtagcttcatcatgaaactttggatctgaagtgagcatatccgttcatcaatttaaaaacaaaaggaatctgaaatattgcttgcttcttccacctttaatatcaataagtcctcttagaggaaatgtcacttgttatttttctgtaatgagtcactttttcgagtaaagggatggagacatggaaatttcatatacataacatagcatatttatataattgtaataatataattcttatatataatcttcattagcatagctccatgttcactgagaaataatttgtaatgataagcatgcattatttacttacttttgattgctatgtaacataaagctttcagaggaagctagcagctgttcaaccttgatgcttaccattcaaagaagttgataaactcaatcaatgatagggatacgccttaatgccatatctacatccgattatatattttgtttagtttgaaagtttttccttgactagttacaggatttaaactgttatggaaagagggagaaaagttcagaagtttgttgatgttaagaataaatctactgctagaaaggcaggctattctgacttttgctgtggcagtcagtgatgggaagtttctatgaccttttttttgtcttcccatggcaccctgaaactctatttctaataatgattgatggtacccataccatgcaatctgaacaacaaaaaaaagcacattataaactctgtaaaagtgtaagagatagggaaacctatctttttggacaattctttgaaaatagaataatgcttaatatttccagacctctagggaaatttaaaatacatattatcaggcaacaaactaaattctttaaataccctaaaaatatgaactatccttttaataatcccatttccttttgggaaaaagttatgtaaaattgtaaaggagataggaacatgttaccatgaaatcttcctataagcatatggctaagattaaaaaaccctctgtgttttaactattgatgttttgtttgggttttcttaatttcaagtgagaaaataccacttatttctattaaggtagtttatctcttgtttaggaaataacattaggattgtatacttgatctggggtgaactttcttgctttcttttggggacagggctaaaggagggcccacgacaggaacgctgtttgtttttcacaaaagttgtttgtgatttcaggtacccctgggaaatctcttgatcagattcacatctgttcctgtcaaagtgggtgctaagataccggtcacccagcaaccatgtccaagagggaattgggccgataataacttcaaaaacgaatgacagatgctagattaggatgaaagacaaaacgcatgaaagatgagcttgttagaatcaaaaatttgttcaagcacctttatgcaaattacatgaatattgaatatttgcatgcagtaatttctacttttttgctcgattgtaaaggaaagaatagtgtatttaaactcacaaatgccacttctttctttgtcactaattaacatacaaagcagaatctctttttaaaaaaatcagattagccacctgggttcttctgtctctacagagaatgtgacaacgttctccttatgacagtgatactttcaagatgacttagcttatctatttttttcttcctgataaacagtctcatgtgagttacgattattttggaagaatataaatccgtttcttgagaaagcaattcagaagtaaccttatcctgttgtccttgaaattgcttaatgtacattaataaaagatcactcgagatgagttcacaccgaaagcccaggcttctcattgactggttaaataacaattcctctaagtaaaggaaagaggaatgctggacaggaaagtgagcaggagatctcttcacaatttaagatgctctttgatacattacagattttctattgagctgttcacatactaatcagagtttagaagggtctgataggatgccgtgactgagagtgccttccgagtcttggtttagtgatgtctaatgtggtcacgtagagaaattgattttcttcagaaattaattaatttttcatatcgccttaagctgcagttaaaaagagtgcatacttgtctgttttttccagaaatattgcctaatcatattaataccattgccccaaggatgaaaagataattgtacaaatgcatttggaaatatgtatcactgagtatttatgattaaattatgcaaatgacccagctcccatcctttccagacccagattgtctaattaggattgatatgctgaatagatgttccagaatttgaatacaagcatgtccaaggagcagaaaattggaaatgacaaggctgaaatccaaagaaaagtgtctttcctttctatactttgttaatgtgctgttagacgttcagggcttttctctccctttggcgattttaagagtcgtgtgtacttattagaaacaaatatggaaaatgaactgaactttagcaattggtattttgcttctacttgacacttatttcaaaatagtaatatcttagtcattcaaagggaacattagtagtcagttgcttcagtataaatttagccttgagagacttttatctagtgttctttgaattggcaatgttgttttaaagctagttctccaaacttgagcagtatgtgagtgaagtattttctaaggataaactttcttaagccatacttcattcatacattggtacattcattcattcattcattcattcatacatgcaatgcatccatacacttactcttgtcgttggagataactgtttaagaacagttctgatcaaggataaagcattttaaatgtaacaatgtttgaattcgaagccctcagcaggctttccccctcactgattacactcattcatcttagatggaggggtggtagcgaggagccgggccatgactgaactgtcaggactccagccttttgttaagcagcgggcagtcactgcctctgaactccctggctcctgctccccatctgcaggatgatggattgcagtgtttaatacatttcagcttttgtctgtcatggtgtagacagacagtactatcagtgatttcaatagtgattagggaaccatttcagactactcctattggccagacagcttccaggaatgtctgatgagacatcctcactggtactctcaccgtggaagggtgaagtctgtgtggagattgtacatggacagttcataccatggcaggggcccactggaaattccagggcaatatcccattttataatcaaattacatatgacggtattaagactattcacactaaccagcctaaagtttaagatgaatttgtcttccttatttaatgacagcatgaagggaagccctgcattccacagactgtgatgtcagttgttgctacgatcctcactacagacccatttatctgtattgaatgagagaatgcaaggattttgttaaagcagtaagatataagctgggatgtgctctgctagtatttgctgagttgtacattctttgtagtgcacaactccagaggggaaatacatttcaacaagcagaaatccactctgaaaacattccgtatcctccctggggttgtcgcgttctatttgtggaactggtgtcaaggaaaaaaagtatataaaagcaaagtgtagttcttcataacataggaaaagttctattttatgaatgggactatagaactcaaattggtaaataatacaacatttaccaattataatacaatatgaccagtggaatgtacatcatgtattataaatcatgtgaatgtaaatcatgtgaatataaatcagttaatatttatgggtgtggacatatgactgcaaagatagtcacagacagaaagcacagcacaaatgtgtgtccatacaaacacatttactcaggcacacatcccacgcatccgtattctcccacctcacttcactttttattaacgaacgcaacagctaaacttaaatttgaccttttgacatgccagtatggtaatagcgacaggtggccctatgtcacctgagttatgaaatcagaagtatatatttttcaaataaccatgtattttccgtcttgttttacattaataaaacaatgctcatcctaagagctgtgcattcattctacatattctaagggagtcattcgtcaggggaaatcagatgtagtggccatacattatactttcatatggaaattaacataactgggattaaataatctaaattttaaaatcaaagcttttttagactttatatagcatatagtgaagtaacgtaacccagtgaagaggctgtgtctcttggaaatgctgtgaggtatggaatgtttaacaagtcaatgtatgatccaccccataattagcctccaaacgatgacaccattgcatacactagcaagcgtttgctgaaagaaccatgatatagctgtctcttgtgagactaggccggggcctagcaaacacttaagtggatgctcacagtcagctattggatggatcacagggcccccaatggaggagctagagaaagtatccaaggagctaaagagatctgcaaccctgtaggtgcaacaacattatgaacaaaccagtaccccggagctcttgactctagctgcatatgtatcaaaagatggcctagtcggccatcactagaaagagaggcccattggacatgcaaactttatatgccccagtacaggggaacgtcagggccaaaaagtgggaatgggtgggtagggaagtggggggggggggtatggggagactttttgagatagcattggaaatgtaattgaggaaaatatgtaataaaaatattaaaaaaaagaatggcagtagttttgctctctagcgtgcagcatctgactgaatgagaagaccaggaggtactgaacaaaaattcggtccaaagtagagtggttcatgctatcttcaggttttactgtgatttttctactaattattttattatgatatttaaggtggtaggtaataattagtaaaaactaagagcactaagtctttctggggaatatgtcataacagcaagaaaggagaatttatggtatagaggagttgtagtctcctactagagagttagtccatagaggaaactggttccttctctcaatatctaatgattgcctatacattttcatctaggggctagaccatgtggagtttcccctacccacatttccaagtgaataggtttgggtacaagtacccatgagcaatgctaaatgaactcagtaggttgtaggtacatggatacacccgggtaggctgtcagccctgttatttatattgttagtcttgtgtttagttaaaccccataattacaaaataatgcaggttatttgttcttgctggatgaatagatgaataaatttatgctagaaatcaaatgcgcgtgtttctcaataggctaaatgaatatgtgtgctgtctggaagggttggttgcccaagaaagaaggatagaacactctttaatccactgaatccatttctagctacattactactcactagctcccatgcctgcttggcagttgtggtcttgatatctaactatgaatccttggtagatccataaattgggagaaatgcaagccaggccagcaggttcaagttctcctttctcagtagcttcctgtaatgatcctacctctaatgaggtgaattactactgcttgaaaaaggagaaaaaggagttttggccatcttaactaataaatcacatcgactgcctggctgatcagatcaattgtgcataaatcagtgccttaaagagtcttaaaataagattttactgggaccaatcgatcctctagattgtgtaaaggcatggtctcctgcccatagcacactgaacatgagcctgcaatcctgacattatgctgtcactatttaaatgaatgttgttagactacagggctgtggctctgaagtgtagttgtcattgtcagtgggtctagttctgtcctatgaatttcaactctagctagttaggctatcaagaaaacttaattcttttttctttttttcttttttagtaatagggtttaaacctaggacctcatgcactctaagaaggttctcttttacagatctaccttgcagttctcttttctttatatttggatctcactagagagctaaacctggacttgcactcattctgtagctcagacaggccctcaacttttgatgcttctattagtatttggaattacaacacacctgtaacatcagggtttgtcaacactggatgttgttgcatatggaagcagctttcgaaagccttagcaacaagaatcatttttaggaatcatttttagaaagtgttctactgctatgaatatttcaaaggagaattgcttctagtacccaccaaactgtttcattatcacagtagctgtgtatatctggcttacttaactgtaggcaccttgcagtcttgagacagagttaggacatttgatttcatagtttgcttctatcagtctatttgagattaatattgctgaccccaagtcatagactcaaatgcactgtggagacaatgtcaatggttttgtacttacaaaggctgtgaggagagcatgtgatgatgcttgcttaaaaaatcatagttttcaaactttaccttagattaccacctaaaataataaaatctctttaccagttccaatcataaaggaaaatttgttctgattctttcggcctttattgtgccttaattttaagaaaatttcagataaatcagcaaaatgtatgaatttgaatttttataaccttatctattaaaatgttgttagtatttacattcaaagatatatttttaaatgatggattgaaaagtttaatactttgaggcacaagaaaagaaaaataatgtttggttacagcacacacgtagaaaattaggttcaatacttctggtaagctgtcatgtgacttctgtgcatgctggagtttctatacaaacttaaattagggatcactgaaccttggacttcatttaaagttgtccacagcattctgagatgagcaaatgtccaaaatctttctaagataaagacacagtttataattattcactatcaaggatcccatagccccgaaatagtgatttttctttaatttttttagtctgaaatattttatggctatggcaaaaatgttccttctttcaaaattctattctgcctttggaaatttatagcatctttgtttttattaattatataacacacataattttccctattagactgtgaaactatgcagattgttgaaattggatccaaaagattttcttctaacaaatttcgactgtgtaaaatttaccagaggagaggacttagagaaaagcaggtgtttggttgttgttgcattatccctgatgtacataaaatttggaaatacagttcatcaaatagagttcgaagtgtagttgtcattgtcaatgggtctgtttctgtgttcataaagtatgggaagacagttgactttcttactggatttttgttttcctcttattgaacaacacaaacacactctcgattctgaatatttaccatattttaggggtaatttaggcaccaataatgaaactttgttatgtgtacagacacatatatgaggctttaacttggaattttaaacttgatcttgattgaaattaaatttacctatcatatgaattttgaactataaaaatcttaattcttaacttacccaaaattttaactaagtggtcataatcctacctaatatatatatatatatatatatatatatatatatatatatatatatatatatatgtatgtgtgtgtgtgtgtgtttgcgcatgtgtgtgtatctaaatgcacatatatagttagataattatgtgttattatctttgtggttattattaactagacagcataatgtcttagatatctataatagctttaagaattgcatttgatctgaatttaaaaataggagcaccaaagataagagctgttaattaagttgcttaggattgtacagaatcctgaacctcccactcttggggatctaatggtatcttcaggcgtctgtgtgcacctaaactcatgcgtacactcttccattcacatacacatatacatatacacttacatatacacgtactttacagtatgatcgccgtgccgctttactgacactgtacatttagagggtgaggataacatgccgaaataattggatccttcctacttcttgtgctttcctgacagatgttagcttattgtctcctctgtgtttcataattttatctacttactgtgttcagaataaagcactgttactactggatattgaaacatttagggattgaaaaaccactcatctgggcatcaaattggaattgacattaattctgttgtaagtggagcctgcagattcagccagtgtctgtggtggcctctattttcctttatgggctgttcttcagattcatctctatcattccatgtcagtcaccatctggatctgctttccatcctagtgattcagcattttgttgatgactttatttcacagtcaaaaagtacttgatattcaggcatccttgtaggaagaacaggtttgtcatattgttaaagtttttgatttgcaactccttggttggataagttcttcaatgtggccacccttgggaagtgtgggaaaccatgctcattgcattggactaattatgcagaaaaaaatgatgctattgctgttctgagagatctccctgtaaggtaagaaatcagttgtgatttttttttcatctaatgtttagtgtcttaccaaagcattgagtaataagagaacactcaggtttagcagtctccagcaattaaggaaaaacagttatgttttgttttgttttgttttgtttgtttgtttgttttaactaaaccaaaaggaagtaattcaggtatagtggttttatatagagtttagcaatgagttgtactgttattaatttttattcctttgcattttttgaagttctatatgtagcctggttggtttcaaactcaaggttccactttatcttcctgagagtggctttgggaattgcagcaaccaatattggaaaagtattcagcaattgaaataaatttcaatctgtttatcactgaattcactagtgtgcattactcttccattgctactcctatccctggcttgtgctttgattgtccaggggtctgttcactatttacttacaacttcattttaatctagcgatacttgatgtcatgaagtcaattcttgaaatcctcatgagtgtgtgccctaaaatgctaattttaagcatatcaggatcacttagttttaaattctattagtatatcctcatgggagccacatttttttttacttcctccttggtaaccattcattgctgaagattcaggtgagggggcttcagtggaaggctgtgaagaaggaagctgtttatatttcctgtagaggcttctgtcttagtggactgtcgctcctcttctactaaattagattcttcacatttataactcctccagggcaagcgtcacaatgctttgcaagtagtatgcttatttaaatgtatgtaatgtataaactcatcccatttaaacaatagaaaaaacatgcatataactttactatagatatatctttccaaggagtcctgatagaatatacaaagctctgtcatttggctcaatatgttgacagaaagagtctttccttgggccttgggatctaccacattggatagagcacttttacatgtctgataagtagggattttttcttgaagaattgtcaactctcctgcaaaatgacaaataatttgaaatttgattatttggaaaaaaatcaaatagatccttagaaacttcttcttgatgtttaagtaatcttaaataatgtatgacaccaaaagaagagaaagaaaatttttatatggtgcttattctaatgtttaaaaaaagaaaaggatttttttccaaactattggaaagatttttgaaaattgaaatttcctttaaacaaagtcagtctaacctgcagagtcagacacctggatggcttctgtatggatgtctgcatttgatatgactttcagctctctatcaactttagaatgtctcaagattcaatgctgagaaatagatatttaagttttgccatatttcccttctactggataccacattatctttacatacgttatccctccccaaccctagccgctgttggcatttgagacaggatctatgttgcttggtttttcctccaagtctcaaacttgtgatccttccatgtcaagctattaaatccacttctgtatttgccaggcactggcatagcctcacaagagacagctatatcagggtcctgtcagcaaaatcttgctggcatatgcaatagtgtctgggtttggtggttgtttaaatgttatccctttcccagtttcccctccacaaacctctatcccatccctactccacctgcttctatgaaggtgctcttccacctacctacccactcccgactccctgtcctggcattccccaacactaggacattgagccccacaggactcaggatcacattttagcttcttttcccttcactgaaccactgtagagtctttcccctgtaatttgtaataatatttctgtacatatttgtctatctgtaatgtcataaatagtgatgcttgtttaagtgagagaatgatagttccataaagagcacactcaaggctggcagctgtaacaaaatttaattttcacctacatttcacagtttattcatggtgcaaagagtttctgttcaagcatcattccagtggactaagaaaaacaggcattactagtgtctaacaaagaggttaagctttggagttttgtgggagaaaaaaaaacacaaattagttggtcgttttctaacaaggtacttgttgcagttctattctatgccactgcaaggcatgtctgaaggttagagtgctatgtaaatgctgtgttgtctgagagcctgggggaatatagtatactaggttaaaaaaaaacaggtttagaagaatagatattgaataatatctgttagtcttttctgattaacttgcatagtaagttccaatatagcttcaaggatgagtgtggctctgtctcaaacaaggtacataaatctatcaaccaatcagcacttatttaatcaatagagatatcttgatatctacaaagaattttgaatttcagaagacatagcttccaggaaaagaaagtcttccttatttttctaaattagattcttaaaacaagcaaaccagccaacctatagtatgctctttacgagtgtgtgagtatgtgtgtgtgcgtgcgcgcgtatgaataatcccctgaatttaggaaaccatagactctgaaaataaaggtatgggctaggatcattgcaagcatgtgtgatcttcctcaactttacatatggtctttatcttttggaagagagaattgataaagtcctactttggagatataaatcatatttctgctgcaaatacaattttgcaaaaaattatctttttttgtttgttcacttttcattgcttttcattttacctttgtagtattagcaaaaggcagatgtggattaacaagttgagaaactttcaaaccataaccaaaaagaaaccttactagtcatctgcaaatgcttgccatgacagaaaaacaagatgaaataaaaattttattacagggatctagattggttaggttggagattagaatgtatctgtttatcaagtttttgatatcaggctggagatgcaagtccttgccatcttggaaacagatgtatatgacacagttaatgaatttaaactttgtattgtgataactgtgaatttccatgattcttggaggatttttcattggagaaaagtcatgattgtatttgggtttcagatccacaactctgtgaatgtgcgtaagttgaactggaaacattttaaaccaaagataatcatattattccagacttaagtgagggaaagttttatgtaaagcagagcagacaaaagacactttaaattataggagactacttgaatgagcagtttaaggaaacagagtaggtgagcttcattctctagttttaggtgagcagtagggagctggtgagactgttgaaactttagtgactgtgactttggggataacttcaaaattatctataaatcaagaaaaacattcagtttcaatatttcttttgtgtttatattttccccaacatctggtttcagatattaatatgaaaaactcacgttttataaaaggccaagtatcattttctattatgaattatttaaagctaaatgaaagtcacatataaagacctgcaaagtgcatgtctttctttgtttctgagttaggattgggttctaagaaatgcctttgtggtgtttgattgcaagcatgtgataatgactagggtcaaaggatgaaaacactctattccataatttgaaagacaaaatggcactgagtaaaatgaacagttctgctatgaggatgccatagtcattttgctaagtgcaaaagctaatgccaaccatggaggccatacctcaagcactgaagtcaacccagtctgtccagtgtgcttgcagattagctgcctcattttctttagtatccgtggacacggtaaacataaaggttatgctgtttttttggtaaatagagatggttaggaagagcacatgaaattgcaacatcactgaacatgtgacagggcgtgaactactgtaaatcaacctcctttcaaatcacttggactcatcattttcacaccaatcatttacaagtcacagtacacattacttttgacattttcactcttttggggaattcatagtggaactggtgtaacttgctttattatcttgacaaaactattcagtatcttaaatacttaatatccatatgagcacttttgtactcaccctatggatttgtatgtatacaaaatacatacttttttttaaaagctaagagaatgtctataatctgaagacacaagaagagttctatcttatctaataacagtatgtttttgacctcttttgtgcaggagctaacacacctccatgactgcaattccttaatgaagcccataagcatatatattgaaatacaaagtctatctactgtagtaaactccagtaatagtaaagattccctcacctctgaataagagctttacctgaattgactcactgtacagggaagtggtttaattgtcttaatagcttgtagtttccagtgcatggccattagtccaggattttgtatctatggggaggcagtccatgaaggcatagccgacttgctcacttcgttactaggaagcagaggtgagaaagaaggaccgggaactccagagttcttccctagagcttgcttccagtgacctccctgtctaccttgagatgcctacttcagaggctcctgactccctcttccaaaacagtgttactcttgggacctaacatttgacacatcctggaaaatattagcaacaagtctatctgatttgttctttgtttttttttttctgttgcactgttcattaagtaattcaatgcaatgttgacagcacactgcagcttaagaaagccattgtagtccttttttttcaatgcaattatttattattgtttgtatcgaacctaaaaagatctttctaatgcacacagcaaaactttgattccttgtaatctgcactcattctgttcaaatgatagaatcaaaataaagctagtatacagagggaaaaggttcagttacgacatttgttttttatttattttttttaattaggtattttcttcatttacatttccaatgctatcccaaaaatccccataccctctcccaccccccctactcccctacccactcactcccacttcttggccctggcgttcccctgtactggggcatataaagtttgcatgaccaaggggcctctcttcccaatgatgtccgactaggccatcttctgatacatatgcaactagagacacgagctccgggggtactggttagttcatattgtagtcctttttaattaacaacttcttaggcttcttctgatatggccattctctgccctccttgtttccttagcttactgatgagaaaatacagtctttattctcacatctatctaagttgtctatactttctccctaccacagggagactgagatctagaattaataataattaaactaatttccagtctaacattttatcacattttgaccttttcattcagtcaactgataactgaataattagtattattttaaacatgtttaaatgttcagatacctttgaatattgctaaaattgtgtaatctaatagtaatgtcacagtagacttattggcagacactcaaaagaacaaatgtttttgctaatcactttatgtgcaatataatatgattcaatgtatacagatacaataattgaaatgagacaatacatttggtaaatattgataccaaatattactagatattgatatatgttaatttggaccttaatcatttctcttttaaaattattattatttttattactacaacaaggagaaggtcttggatcgtgtgtgtgtgtgtgaaataaaagctatattttacctataattcatatttgtcatgcatctaatatgtgatggctatttcttctatatatgttggatattctagtaagtatcacacaaacaattcagcactcataagcaatattttcacactcatgtgtatggaaggagtgacaataactacattaataaatgagagaagtatttggatttaggctggcataatataatagatcttggtaaggggagcttatggttagaatagtgcacgaattgacattgtaaagacggtgatcaggatgacagcgatcttcttgagaaatgacatttgagtcaatatttgaaggcgtaaagaactcagaggcattttatcaatgctttttttctctttgcattttcttttgtaaatagaaggtaggaaatgtggcagtaatggaatagcacctttcctgtaaacaaacaaggaaatattaacgatttctttttctactggatgagatgaaactgctacacagcacagttgggttttgatgtattgcccctaccacctaccagcttcagctcactcatctttttatttgaggatattttattaaatcatatacactaagaactcagcacagttatagacttagtagacagtcattaatataaatattcacttcttttatttaatagcatcacatcgtttccaaaaccaatgtcgttttaaaactcaccacatgctgtacctatttggaagctgagaacactctataatgatgtattgcttttctacaaggtcaaaagaataccttggaatcctttagatatgttcattagtgatccattatcaaattccatctctaaataccacagttgattctgcatttaacaaactctccttacttataattttaaaattatttcagtttttaaatatactgtcagtttttaagttaaaaaaatcactgtgattcttatttactaatttctctagatacagatttcctaatctatgcaacaggccttttctagataaagcctataggaaagagtgtgagataatttttacctagagaagaacctgagaagacaaaacaaactacccttttggaggcagtccagaagcgcaacaattttcaccttgtattagttttcattttgataacaaatacagtatttcttatggatgcccgtgattctgatgctgaaattgttagttttgtacagcgtcttttcttccattttcctcctttgagttgttcagtttcttgcttttttttcccacatatcccagtaaacaaggctttatttctcttggcaggctctgggtaacttattcatgaagcatacggggtgatttcttcctttaatagactagtagttactgttttcaaacaacttccttcagtttattttggttttattttgaagacatgagcaaacattgccagttttcctcagtacacatggtgaaggaataatgaattttggtagggagtcgggaagaaatggggaaaatgttggcaagcatttttcatcttttgtttgccaaattcctgggctggttcttaagtcaaaattctcctccctgtgcatgaatagccatcaacagacaggcaggcaggaaagagtgtaggaggaaatcagtggttaaaaagaaagcatggaaagtgacacacctgagttttcagcttctgacacatatactgatatctacttcgtttccccaaagtatactggtcctttgattctatctatacatgcgagtatatgcagtgtttcatagttattaaaaacatatttttcctgctatcactatcagagacaaaaaaaagttgaaatatgagaaaataaattagttttagtagaacatggaaaaactcccttgtcatagaaatgctaagatggatacccctttttacaaaatgagaaaaagggtcaaccataggctgaggctgagggtgggaactgggaacagaggtagtaaactgtggaatttctcaagtgctgacttcattcttgggactactttgttttatatagatcatgattctacaaacgatgtcccataatagcagttcagagatgctctggggcgcaatagctttagatagtagagattaggtagatattccgggtctttgaggctggtctatttcacgagcttgttatatgagaacctctatcttatccattttgcctctaatcacgtttttcatttcttgtgtgtgcttcactcataaccctgtttttatgtcataacagttgctgtatcagcacccttctctttccagtactcaattttaaacagcctcattatgaagaatatagcacttaaaaacatggcacaaatgtgtattactgcagcacaagataaaagaaattattgagaaattcacatagtgctgaagtaactttatcctaagggacacttcactcttttaattgattttttttccgttccattttattaagagttcttggacaaggaaaatggcaagttacctcctagaaataagggagcacttgacttaattgggatactactggtgagtctgtcccaccaccatagtaaagttaacctcatcttaaaatcagtttatagtgaaaaacaacaacaacaataaaccagttagaaacatttagttctaattttgctaaaatcaatttgatttttcaaataccttttgctaataggaagagtaaacatgttttcttatttatgggagcctttcaaaaagaactacagagattgcaacttattgtcttagacacatttactctgaaggtatgttcttgtctagcttcataaacccactcctacataaaacactgtagtcttgttatgtcttcaattgaagggaagaaggaaggagggaaggaaggaaggaaggaaggaaggaaggaaggaaggaaggaaggaaggaaggaagaaagaaagaaagaaagaaagaaagaaagaaagaaaggaaggaaggaaggaaggaaggaaggaaggaaggaaggaagaaaggaagaaaggaagaaagaaaaagagaggaaaggagtcagactgttttccttaattgacttcttgctcttaggaaagggaaaacacttcttgcttttatgaaatccgtaggagatacgtatgcatcaacagaaactgtttcagtgcttgctcaccgagcttaaccgaatactattgaaatgagagtaaacaaaatgatagatgtgactccaccaccaccaacagatgggacattctgtgctctcagcatttatatttttctagtagcaaaaggtgtcttactttgagaccttaaataaattaaggccaagcatttgaaaaaattcccattctattataataagaaaaaaatgatcaaatgttaactcagtggtcaacttgagttttaagtatcatttcctcttcgttaaaaccaaacatactttatacatttacagaatttttggcaagactatacattgaaatttttttatataaatttaatacgtagacatctcacagattctctctttacacccatgggacaggaaaagcttattttttttttaatgtttgtgtgagtcccaggcattttaacaaatactttagacaatatttaacatgttggagtcaaattatgctgtttttggtaacaacaatattctcattttaagaatgaattgttgacttattctttgtattcaaaagctgtgataatcatttagaaaaaaaataaatatcattttattaataagaggctcactttatctattcctatttagctgtcttctttttgtcaggatgtagaccaaagattgtagagagatcctttactgtctaaacacccagcacacaactgcttctcaatagaaataacacacgaaatgtgttcaaagacaatacatagcctgagaaattcttgtgtgctgacagctccccaacagtgttatcacagcagggagacatcagttgaagaaacagatagtgacctcaaaaaaagtctggtcagcagtgtggacagggtttcacaagattataaatcaccccagggtcgctctgttcccaccataaagagagcatggtcattttattgtaatctaataagagacaggagcaaaggacagctccagtgtgtgtttgaaaaaaaaaatcttgattacagtttcaaaactatacagtttctctgctattgaagtgtagattatagggttaaggccctgttaggattggattaccttttatagctgaatgttatcccctggttcatgaatcagaaagtacttaaattaaactgaacatttgggagcaatctcaggatgtggcttggtggtagaaaattaatcattatttggtggtagattattaaactgttcatgtgaagggggtctcttacagaatcagaaaattaactctgtgtcaggtatacatcaacaatgtggggcaccctctatgtaacatgttatgttaggattggtttcagcgggagtgactcactgatagaaaacacacatttatattaagtgtacattaagaggtaataataagtctgcattgagcaactgccagggttttaagttttttggatcttgaataattttcacagtatctcttaaattagcttgcccgtttattttctagattactattaaataattactattaaataattataaatagttgctgaatgcttcagattcaacgtcaagagagctaacaaaaaagttatcctaagaatctcagggaaaccaaaatttctctaaattagaccgaacaccgaagaatcgaagaaagagtattggaactttgaagaaaaacttgatttgatgctgtcctaaatgttcccttcttcttgatttgaccttagaacttcccgtgtggagggcaaggaaggttttagcttttccccgtcagtttatcaccttaagcttacttctttatgaagccacactttggagttttagccccgaaatggcttttgttccgcaagttagcacctttgccttgtcagtttgtttctgaggaactgagctgacacccagagataacggctatccatccgtcttgagcgttggactgaatgccgattgctaagaagcagccattagaagagagagaaaaagtaaggtaatactgctaagggtatactttatgctatttttccagacccaaacgtaaataaattggagtttacagcttttcccttcatgctaggcctgaacggagctttgcaggctgtttgtctgagttctcttctgtttcccttaaggagtcacagatcccatggtctctctctcttgttaactttcctgagcagagatgaacgtgaagggaattctgtctcccggaggatattagactggtcggttaaacattgtgggtctttaattcatctcagtttattttccacctgtcagtttctctttgtttcttctttgttttatgtgccgaagtaggggtgcaggctggtttcccggggtctctttgccattttgctttctccacggctgctcaagatgttcctgcatgaactggaacctggatatgcaggcgagttcaatgctattatgaatttaagttgggggggggtgcacactactttatttttataagctggcattggatgaaataacacaagctgtgaaggccaatgtaacatcaagcaatgaagggccaagtgaaggataccaagttttttatgttagttcatgttatcttcattctgcttcccactggtagcttgagtacttgaatatgaagttctcaaacacttaacaaatacatttttaaaaaccatatatttgactctgactttttagaccagttctccctctgtcaaggctatagaaatatttttatttgctatggaaataaaatataagtaaatatctttacttaaaatatctgggtatttgagaaggtcaaggtgttttgatttcttacaagtagaaggcagaacagctcctcaccttctatgctcccccatctccaggtaaagagtaccccgcaatccacagcaaccctcctgtggctaagagctgcttatagccatgtgttttacatatatatctttttgcaatctttattactagatgctctcagatagaaagtagataagtgcaaatgccaaggcatatttttgttagtgacactgagtagcctggctacggtagaaaaacaaatgtgcttattgtgatttatcacttctgacatcagcgtgttccatacggctctctgggaagtaaaatggttgctcctgaggacagtgatgtaaacactactttgattatgtgaaacaaaccattaggctttgaagaaaaaactattaccatggtggatcctgcacagggggaagggggcttgctgataatggatgaacaaactcagatgtcttgcttagaatccaaagaagccaaagcttagtatttaaaaaaacctaaataactaaattttctttggatttgtaaatcagaggttcagcattgtgaggacttagttacgttaatgttctcttctataagcaatacattcaaaaaaatctttgttcaaattgggctttaaaattaaggtcactttattaccccctccaaaagtaagttcctaaatgggattttacttactttcacagaaaactatgctatatctcacttaaacacacacatattaccaaacctaattattaattatattttcatttttgttgtgatttatcaatgcagattatatttgacttatcaacctcccaactccttaaattaccccactatgaagaaattttcttgaacatgtgtaagttaacatatttaaggacccaatgaaagccacttcttagctatcatatgttagtgtatagtgaatgtcagattagacaattctgttcaatgttgtaaataaactccttgtctttagaggacaatatttaaataactttataagggagatgtcttaattagaatttgtattcttgcacaaaacatcttgattaagaagaaagttggagaggaaagggtttattcagcttatacttccacattgctgttcattaccaaaggtactaaggacaggaactcacacagggcaggaagcagaagctgatgtagaggccatggaattgcttcccctagtttgctcaacttgctttcttaaagaacccagcccagggatggcaccacctacaatgggctgggccctgcccccttgatcactaattgagaaaatgccttacagctggacctcatgatggcatttcctcaagggaggctcctttctctgtgataactccagcttgtgtcaagttgacacacaaagccaggcagtacaggagggtaacgccagaaggaacactggaaggaggacagcagtcacaagagtggaagtagtaactatcatgaatagaaaatactgatgtgacccttgaccatagtcattagcgaccacatagcccaagacaggaaaagagagagttgtctcctcaggatgagctgtgtcaagagaaaattgatggaacttgaaagacaacaagagggatatatgggaggatttggatggaggaaaggaaaagagaaaatgtcataatattaaaatttcaaaatacaagaaatcattaaaaggagggaaatgagtggcttaaaaggcacagcgtgcctcctgacccttccctgagacagttaacacactggtgacaaacattccaacatactaaaattacttcttttgtacatagcgcaaaatacgtatttgaataagttttaaagctacaaagcacagcttatcgttttaaaaatttaaagatttaagtgtttacaggcttactttcttaattagaccgcattaaatttggatgtagacactgtacatataatgggcataattttcccatgaggaaatgtcagtttctcagaggctaaagacatgatcttcccactgcctgataccttcttgtcagcctgagtttctgctacggacttttgaaggaccgtggttttgccatcctcagggatgaagtcttcctcagaagcatttagctgggaagacagagcagagcaagtggtatcagcgagtggttttatatttagtgcttccccccacgagtctattctatctgttcagtatatagaggaaagacagcctgaaagtaacaactcgttgtgtaagtgttgacagaccaccctaattcacttacccaggttgcagagcctccaaacagttaaacaaatgctatctcaggtattatgaaatacagatactattaggtgaatgttaatttaatgagtctaataccaccattctttgcaaatggctcagatacaaggcagttgctttaaaatatagctgccagtttttatcctaaagaacagaaaattttccccaaggaaggaatttatatctaatctctgccttatattgggaaaccccaataaattgcatatttgtgaccccccctgggcttttctctcactacttcaattggtaggcacagtctgaggttttattatcagtgacatacattaaattatcaatgacgaaagggcactttcccattgaaggtgactccaatgtttttataaacttaataaagagtgttctgtcaacgaccttattcttttatggtacgttgatagtcttttgatgtggtcctctctgtcttgctctcagcttcattcttcgggtctgctggcacttctgctattatggaatcatttcctggttgagtgaatgttttctcagggtttgaacttagtgtggaactcaaggatgccttaccaattaagttgcaagttgattttgtttttagccagcttggcatcaaaggctgagctctgcaaattaatgaagcccatgttgtaatgattagttttcagctcctgcagccaatacattatataacaaggggtgatctggtttagcaagtggcaaatcagtaggctatagatctagccttgcctgaaattacctcagaagagaattattataaacttcctatttttgggaaagttgggacttgtgacctaagataagtagacttgttttcttgagtttgaaatagaaatccaacaacttctcatctattttattctattatttccaataaaatgtctcccaactcacattgtaaaagtgaatctaagtggggatagtggcacaatttctaatcctaacactccagaggctgagaggaggtctgaaaattctgagcaaatctaagctgtataacaacctgggctacataagaaaaatttgttctgaacaccaacagtaagtctagcataccagggcactttatccatgtgacaataattgagaataacaatccttctttgaaatcattgtataagaataatctaaatatctctgggtgcattgaacaggtttaattgtgaagcatccatagattcaaatttaaggttactgttgctctctcttcccacttacagttaatgagaattccaacagttagcttcagttgagcagtcaatgtgttctgcatgccttgctggtcaagtactcttttgggtgttaagagaaaatggcaaataaaaagcagtttcttttctctaggatttgctatagatctctctctctctctctctctcaacaaaattaaatacattttatttttcttatatatgtatttagtatttactttgtaatttagatataaagaatacatgtaaatagcatgtacaattaaatgtaaagggacaggttttgactcaccaagttctcatgagtaaacaactataacatgctatagcaggaaggaggtatcctctcaaagaaagaaaaataaagaaccaaagccaaagcaacaaacctccaagcatgccatgaacaagtgtggaaatgcaggtaaagtcaggttacctgtctttttgagcctaggcttacagtatgattactgtaggggacagtatccaaagggatgcgatggcacaagtccatacttaacagtaaataaacgttttgtataacttagacaatgagtatttgaaacagaatgatggaggtgaaccattggaaacatcctgactctagaatagttctttaagttttttccactggtgtatttaaaaatcacttaaaagaactcaaagctagtgtttaaaacacaaatatgccataaggaatccagattacaaaagaaaacaatcaaatcaaggaatatgttttatattcatacatgtagactatatgtaagattttgttggtataaaagttttcatttactgtcaggcagtcaaagtgacatttcagtgaatgctttaagagtctgtttttttaaatgcagcatttgggatctgcactgacatgccaaaggcagtgggctcagggtgttaattctttccatgtttttgttttacatgtgcgtgggtacagctgtctgtgctgttgccagatgtcagagtaggggcttcaggaagcttttctgcagatctgccacttcccagaggtgaaatattatagcgtaaaataacattccacatataaattcaagttatctgcttgcttgcttgcttcttttctttctttctttctttctttctttctttctttctttctttctttctttctttctttctttctttctttctttctttctttctttctctctttctctctctctctctctctctctctctctttctttctttctttctttctttctttctttctttctttctttttatctttnnnnnnnnnnnnnnnnnnnntttctttctttctttttatctttctttctcagagtttaggtgttaatcagaaacaaagtggtcaggcatgaatccaaacttgccttgaactattcacaaaaatgttatgtataatagcccaaacaagaaaatagtccacggtagcaaaacttgataaataaacaaaatgttatgcatctatacaatagatatagtatttggagaaagcaaaaaaaaccctactgacactgtaacagttgaaatttaaaaacattttgctaaatcaaggaagccagaaacaaaatgatttatgtgtatattattcaatttatgaaaacttgatcacaataagccaaattttaaagtatgatcagttcctacatgtgattgtgagtatattgtaatattactaatatacaaagagcttattatatagtggtgggcaaaacagctttaaaattaaatcatctatggctgtggagatgacccccatggagtcatcttgtgcaatcctaaaatcctgattttgaatctacagtaccatgtaaaatatgtctctgccagatgtgcctgtaatctcaaaattgttatgattgaggccagcagatattggaagcttagtgttcagccagcctaccttttggttaagggaggggtcttatcacaagagaatagggtagagacagatagatcaagacatctgacatcgtcctttggtcttgacacaggcatgtgccactgtgcacacacacttacatatcacccacacaaaattagactgtggagagagtgcatagctttctaaatttgtcaacactatttagtcacacattttctcatataggtgaatgtatatgataggattagtttctaagtaaagctatagaaggcacacattttataaacaaatgaggaggaaaggagtgaaataatacagaaaacccaacgaggtcatcagatccttggaactagagttacaggtgtctgtgagctgtccagtgtgggtgctgagaactgaacctgggttctctgcaagtgtgtcaatctcttctaacttccaagccatctctccatacttgttttataacactaattaaaaatgcactcagagctggaccagtaagtaagaatcatatacttagtaatactttaaaatccatgccttcttttcttccttaattttttacttttaattttccaatttcactatgaatacaattaataaattaatagtgaacttcaattaatggtaactttttcaaatctttctttcattaacttctttacttagggcttgattctctggcaaagtctttggatatatatatataatcaaaataaggtttatgtaatagtagtaaggctaagctattagtgaaatagacaaatatatgaaataaaggttccaatctttagccttacagagcccaagacattgcatgtgtttggatagacccataacttttcctgacctcatgaaagaaaagataaaattgattgaggagtaccctcccctccagttgtataaactaacatggagttatgccaagtcttttgctgaagtagtaattgaaataatagtttaatggctgcaaagagtttgcctcaatctagaaggaataaaattaaaaagtcatattttgacacaaagagaaattgtagttgactgtgtaaaacaaacaaaataaaactcagatgtgctgtggtgttacatggtctgtgtatgtctctctccaagctttctctcccctttcttgctcacctgctcatatatttctttttctttctgaacagattcattgagctccttctacatactgaccatacagggtccttcttggtgcatatataatacacagcatatagctctgtatttcctgtgattacaaatgtctggattgcttctgccttttcagtcatcagcgaggtggtcagaatattaggaaaaattcctcatccttttggcagcgttttagtttgtttctttttaaatgcttagttaagcttgaatatccttttctgaacccaagttgattcctcttttaaataatattaatagtgatatacaatattcataggataaataaagtttaattatttaacatgtggagcttggattttggctaattgtaggcagccagtagaaaatcacactgggaataatggtttaaaaatatgtggaagtttctgcatgctctgtagaaatttcatctatctttagctttattacatgatatttatttaataacagattaactttcagctattacataataaaaaattggttaggaatctctccttgacatccaaaagattaacgaagtctataccatgaatttaagctattattgatatcaatccagataaatagtcttcttgtttgaattagggaaatgtatttcagtaatgttttcacactttttaagtataaacctccaaatgaatagcctttgaaactcaaatcatttagctttcatttgtttactgatgcaaactacttcatatcattaaactgtgagtataatatatgtttgttgccacttcaagtactttgttttttaacttttaaggtttgtgataactcagcttgaaatgcccttttgatggtaaaaaagcaaattaattttatcttctatctatctcctttagctgtgtgtttattgtgacctctgtatacctgtaacacaatgtgttaaattactttctaagatttttcatgttttagaaacaagtataacatccaggaaaatttcatcacatgattttgattgtaatacatgaaataagcaaaatgcttttcttggtacatgaaaacacatccaagtctgacctggattataaaaattggaagcaaaaggtcaaataatactgcactcttcttatttaattatttattttgctaagggaaagttttattaataggagtattacactcaattatgcatatgtatggagttagaaaaaaacaattcttgagtattttatttttcttacaaagtctgttctagtcagcatacaagaaattataaaaaggcaagtgaccacttttgttgtcctacttttctatattttaaaatatattctcaaagataaagtcaccaaagatttttaaaacccatggaaccacaaaatgaagaccatgtaaatgccttgtttcttttatgcttagtgaattgttttccaaagtagcatttaatttctttacaatttcgtagaacttttacattatggataacaaggtcattaactttttgtttgttctgttacctcatcttcgtcttgttttcctatggcttcagctgagagatattgactcctttacaccttaaccttcttttgattgtggtttctaccatgacaggataattttaaactcagtcttgattgagcatatgccaccttttatatgctttgcatagcatagagttgtacaagagcacctcatattagaaaagtgaatcttactcaaggagtgttttgtttttacccattgaaattttctggaagtgtgcagtgcaagctctatagaaactatctgagatttaccagagtccaagagcaaaggcatgtcagcaatgtggtcttcttgcactttgccttcatttgagaaatgtgttacagaggaagtgaacaatataaaaatttcacactcccatgccccagtttttaagtatattgtagctgtttatctatatagttttctccacggtgaattgtagactttttgtaaagtgagtatggcgattcagtacaaattgagaaggaacaccttttcccaaactctgtattagttcctttaagagaacattttaatagtagataagaaaaaaaatcattattaaatttagaatgagatctttattaatgtgctcgtgttttcctgtgttgcacatatttccttaaatttaaacgaggaaaagaagattatgttagtccatgtggtttgcagctaccaagagaagtagtaaacaattcctcttgcaaagaggttttgggagtcctaatatttctgatgactacacataggagaaaaattcagttctattcactcaaatcggatcatgctctgatcacctcaatatgtcaaaaggaacgacagcaagcatgtccaggtcacaggagcattccaagtaaaattaacagttgaatgttgtatagaaatagagtatatacaactgaagggattacaattaaattcacaggcttttggcatataaatctataaagagtcagattggagatggaaactgtaccatctccctttatccccttcctttttaactgaaacacatagctatatcaagtatctttgtaaactaaatggggatggaaactgttcaatggtgggattagagatatatagaacactgttatttttcaattctttttttttgcttttttttcaattttttattagatattttcttcatttacatttcaaatgctatcccgaaattcctttataccctcctccgctctgctctcctactcacccactcccactcttggccctggcattcccctgtactggggcatataaagtttgtaagaccaaggggcctctcttcccaatgatggcccactaggccatcttctgctacatatgcagctagagacacgagctcaaggggtactggttagttcacattattgttccacctatagggttgcaaacctcttcagcaccttgggtactttctctcacttatttttcaattcttgtacagttgagagaaactgtatcacagcacataggagcttggagatgtggataaactctcttgaatagggtcatcatttcttccttagactgcgtgtgtgtagagacatctaccttgcccactttttaaccccttgaagttgggcctatctatttcagattcagatgtcaagaactactgtgtcatcttgctttatcttaggtctttaaaacctgttcttgatggatcatacatagaagctcacacttcgaaaattttaatggagaattggttgatgctgtgacaagtgttcaagaattgaagcttaaaagaccttttctgagctgggcgtggtggcgccctctcccaactctcgggaggtagagctagaactcagatttctgagttcgaggccagcctggtctacaaagtgagttccaggacagccaggtctatacagagaaaccctgtctcgaaaaaacaaaacaaaacaaaacaaaacaaaaacaaaacaaaacaaaaaatcaaagaaaacctaactttaccattatatttgagtaaaagaagagtatctatataaatatttttacttgtatggaaaaaaaaagaccttttctgttcccgtatgcatctcccttttctttttggtgttcccactagtgtaatccttgtaggaaatttaggaggcaaattaaaatcctacactatctatatggaaaatatagtgggataaagatagtgagctgataattttaggttttactgttgagtatttttaggttggacttctatttgaaaaccgcatatctatgggatagatatggagttcacttgatagagtgctttcccatcatgcatatgataagtcaagcatgatgtaatctgaatatccagaaggtagaaacagtagaactaaatattcaaggttatctttggctatttagtgaatttgaggccagttacaaaatacactgtctggaaaattaataaccatttaatttttcctttattaattttttattttttagttatcatataatgcataacctgaaaaactatatcaccatttttagctgggtgctgccactctcttgagtatagaataacttctctctgacttactggcactatggtgagggcctgggcttcatagaaccctctaatacattttgcagtaggttattggtattgttagtctttttctttcttccttgggaattctcctcccttatggctctcttggatttaccttagtcttattctgtatagatcagtgaagtaaaaatgagctgtttctgttccactctagctatcttcacttataactcttgtctttagtactgttgattcaattatgttacatttagcataccaatatctgaaatgatcttttgtttgtcagttttgtcttctccttagtatggtattctttaaaacaaggaactgtgctgtttccactactggatactcactactgagggcagaacttgacattttgtaaggggttagttaatgtttgttaaatgagttatgtaacagaacatttatactatccagtttgctcctctcctatgaagaatgaagaatgatgtttgtacactgtaatgatatttctgcatgtagaagaataaatgggtacagaaaggtgaatggctcatctcctttcttatagctagcaaaatatgtcataatagttgtaaacttgagaaataattggaggttcccagtttcaaaccaggattaaataaattaaagggggctagggtcctgtggtacttgctaagttccatgcggggcattttccatgtacatcagatgaacagatgaactctgcatccttatcagttattgctcctaagggagtagaatttaaactgctttatttgcctcccatcccccctctctgtatgtgtgtgtgggtgtgtgcgtgtggtgatggttagtgcaagctgcagatcaggagaaaaagcaatgtagaatgtttccctaagtttaatttttcttctttcttcttgctgccttaatgaggagaagcttcattttgcccccaaaccgcacagtttttacaaggaaatctgcttgtgtaaatcttttctctgttctttcaggctctgggaactgtcctacctctgtgctctggtggtcttccagacctgacacaccttgggtgccaccatactggttttcctcacctttgatggcattttcaaaactggtctctgtatcacccagctcctccagatgtcagcatttgagaaggttatagtctacacctggccattggtctattttggaaacaagaatggggacatggaatgaaaacatgtgtagattaaacgatacaagatagcatcagggttaaaacaaacaggtgtggggatgcaggcctgtaatgctaagttttcaactgaatctgaagcaagaaggctctaagtttaaggctagtcttgtctttatagtgagttcctgatcagcctagatttttgatctcaatacagaacggaaacaatgatgatgatgatgataaaaataaaactacaaagaatcccaaaccagaagaaaaagcaagaaaactataagctttattattgtgcatttttgatttctattactgtgataaacaggatgaccaaaagcaacttagggaggaaaggacttgtttcatcttggagcttacagttagccatttaaggaagtcaaagttggcagtcgaggtaggaatatggaactgatgcagaagccatgattgaacactgcttattagatggcttttcgtggtttgcataaattcttacactaacccagaccaccttcccactggtagcactacacacagtgaggtagaccttcccatatcattgattaatcggggaaatgccccacaggatatctctcagccaaaatttcttttcagatctatctagttttgtatcaggttgacaaaatctcaccagcacaataagggtcatagctcactttaccaccagatatttttggcttacattgacattttatttttgataactgaaagtttattggtgattttagttcctagtgatacctaactggagcagccagacccataaacatgctcatggccatgcaggagcaaataggagataacccagtagagtgtaataaggtgaaatgatgatagctcagacgacagtcatagctataaagaataacttctcagcccagccacaggaaatgcaatttccttactggtgcctgatgacatgtattcaaacaccacgttccttcccgcctcctttatccccacctgcagcaaagctgtagacaacaagaagttgatttgaacttatttccaccaaatttatcccttgcccataccttcagtcatgtgaatctataataacttttgctcagccagcaatgataatgcaacactggaaccatttatccctgagactctatcaggccaccctgcacttacctttctgttagtaatattttattattgcattacctatctccaaatcttttaattccttgtggactttggtggccactttagtacagactcagatagacatggcatggtacacagttgccctttaacttttcttccccttaaagagatattaaatttaattatatttaattctataaccatccaaatataatttcaacacagtgtcaacacaaaactatcaaaggggaaactttatgtttggttctcataggaatattttaggcaatcctgccatttcaatgatgcacattgcaaatttgtacagattgccttggggtaacatgtggtgtattgttcatgaagactttgttccttcaccagagtcatagcatctacaagagtgcctgtccttctctaagaaggcagtcagcattgagtcatccacatccagtgcccacctagccctatatttagacttttctctgtgtgagagtcttagaaatggcaaagtatcagagagttgtcctagagagtgtattgtacactatctgcatccttcgatggattacacagctagtccatggctctgaagttttgcaatttccctcctctgggctatggtcttgtgttatctgaagaataaaacggttggatgcgtggaacaattccatgtccagttctaatattagatttttcttttttatccatccttatttccttactttttctctaaaaacctagaataaaaatgtccgatgctcctgtgccttacaatagcctcttctgatctctgtcattttgctaaagaaaaccctgattacatccatgagttgactaccttcatttattaataaacacacacatagttttactgaaacatttcctctaatttcttggttctcttctaactttaattttaaagcaatcttagatttgatcaatgagggtttgttttgagaacggatagaaatgctaagcttccctgagtggttcagaattcaattacgtattatccgtgatacagtgaactttgtttatgtcacacattgagttttatttacttgggaaaatgtcagtcctttcccttgaagatgaaccccccaaaatgtccctgaactcagtgttccaaatggcattcgggatttcttttcagtaaatctaccactcctcaatacgattctcagatattttaaattctgatattcctcagtcttttatgaatggatataaacctgattatcaactcttttgaaaatgtggtattcatcaaactgcgtctgcaagtgaagggaagtgtgcttcaccagttcactaaattagggaacagtgtcattgtaggcagtggtaatgccaagtaacactgggcactgaagcctggctctcattcagcttcttgccatggttttttatagccacatgaatactccaaacccacacctagaaaacagtctgtggatgctgttacttggacagtcttgctccaaggaatatttggacattagcataaaggttgcacatgttatacaaagtgtaattaaagaagctttgatccccaaatgtcaactagcttgctaagtgtcataacaaagtgtcaggcatctggtatacagttaatttgtagtcattaactccatattgttgatgtgacagtttgttagggaagcaagcttgacagttgcattttgttcttgattgacatccacagacctccccaccagtttagtttacattcctattggaatttcctcaggttgcattttttgctgcttaatttctctcaacttaccagatgaagtggcagtaaacttttaaaaacgtgctataagcatacagaattccagcatcattatctaaaagagtctaaatgttcactaatgttagaaataagaaagacttgttgatccttcattagaaatcaaagatttgttcaagggatgttgataacatatgcattatcttcatgcataatgttcacaaatgacatatttataatatggcaattgctatgacaattaatctagtcagcactaatttcttgtacagttccattaatatttccacttttcagaggctcagaaaacagataactggatacttcatcatattcttaattgcattgatttaatttaaaaagtccattataatctaatttaattcctttaatgttttgaaattttagttgtatcaaattaagttcaacttggttgatgccaggtttttactcttgttattaatataatcttatttgaacaatgttttctgagttatttcagacttcactcttacacattctcccattataccagctatatgtatatttttcagagaatcactttaacaaatgataaatatgtctttataataagataaagagtatattaattattcaaaaacatgttagttcattttctattgtagtactaaattaagcaaaatgcttaatttaaaaatctgtaaaagatatggttataatttacttcatataatttttctctgtttacttagcttttctgtttggaataacttggtgttctagacaaagattatgaaatcactaaaggaaaaaaatgaatttatattcagttgtctattttattttattttatttttttgttagcagagaaggcctcatttggttgagtattataaaccattaatttaattacttaaatctatctaatcctttgcctggcaattatttttatacaagtataacaagaaaacagagagatgtcttaactgagctcttcatgtcagaattcaagcattcattctcctcctgcctcaacccaaactggcatcttgtattggatgtatactttcctctatgcaagatttcatacacacttcatgaaaacaaaatcactggattagataatcccatgtttactataattttaaagattataaattatacatgattccggaccacctttgtgaaaaggccatctatttaaatattgcttgaacgtgtttcttgggacatgtcgcttggcattttgtgtgttatcctaattggatattctcatacatcacagccgagtctacatgttcaatgaccttgggggacaatgctcagatggtatcatgctggtaattacttttttgtttcaatatttatctgagtgtgcctgcatgtgtgtggtagtggacacttctgtagaggtcaaaggactaatctgaggtgttattttcaaccttctgctctgttgacacaaggtctgtcttgggtttgcagctctgctgctatctggcctatgagtttctaagtctcctgtcactgcctataagcttgttgtgggaatctgcactttacatgttccagtcatttgacttttcttatttataaaggatctggggtttgaacttaggtggtaaggatactgcttttattggtagagccaaagctcaataatttgtattggaactttttgcttgctatggttacttttctttcccagttgtactgtctgtgagcaggaaaaggagtgatttctccttgagaatgaagaacagaaaacttcctgattggagagatgggaaagtatctgcaaatggaggtgagagcatgcgtgttgatatcagaggaccatgagactgatgcttgaatttgattttgaggatgataggtctgcattgatcattcgcctgatcataatattttgaacaattaattgaagatgtcaagtgttctgttgtttttttttttattttgaatgtgagatataggttttgtgatgttaaacattgtaatggtagttggaaaattatctgacactgtagttgtataaagtggttatgactgctaggagtgaacttagggtgctttcaaattcagttctctctagtctctattaaagaaatgtgataacactcattgtttacatatgccacacgtgatcataaagcacagtttctagagctcattgtgctcttgatattatgaatgcatgagttctattgtatttatttgaaaattctgaatacatgtcaatgattgtacatatcagacaacatcttagaagccatgtatggaaacaactgcaacttgagcagtgatagggtggaagattagacgtgaatttttacaaactgcaaagaaggctcagaagaactagtggttcaaggctatcttcattaacacatactcaactcaacatttcaacttaaagaatagaaccatctcataaataacaatagcagtttaggacccagcttcttaaattgagagtggcctcatcaatcaatgaaggcttattaagaatttggctgcaataaagttttttgaatgtgcaatgatcaaaagtcaattcaaaaatcaaaagtgtaatgaatctaagagatttctggcagtacttgctagtgttgaaatacatgactgcatgctgttacagcattcaacaccaccaaatgccttctaaaattccctggttcagactagagactattacatgctttgaattttagtctttttattatacatacaatttctctccctttaaagaaacccagtggttaattacacaaaacaaataattttaatattttttgctatcatcattccttagaatgtaagcgtcagagtcgggtatgtttgaattgtactttgttagagtgtttaacttttaaaattcttgtttaagttgctggtttgaattgtgtaagaaattgtcaatgaaatttgaattgagattaggatagtatttccagcaatttctgaaatggacctacatacacttctgccgttttttgttttttgttttattacatatttgtgcaaatcagcattctctacattggtcattataaattcaacatattaaactctgtaaagcattgaaagtgctctatgttctttaatatcagattgtcagcaagacttaattcttcatgcaaaaaaaatctcattagcatgcatggtgaaatctttattaaatggtaaaaatatatggaccgccaaggatcattttgaaagaattttttatttattttcagtaaaattcagtttatgcaatgtagttgcacatatgcctactttgtgggatataaaaaattctctgaaaaaggctcacatgtggtaaaactttaattagctctggttaggtggtgttgatgtatgaactgtaaaatctaatcatgacaatgagaatcagcctcttcccattgtggtgtcttcctttacctggtacaatatttgaacctcttcttgcaaggtagaagcccaaagagaccttagaacagatttgaattatactacatggattatagtacaagctaaagccttttaaacacaaacttcaagggacactcacaacactcacatttcagagtatgttggcaacctatttgttgccccatgattgccacagagctttcttctacttcagattatactacatgattttggaatgagagcaatatctttaactaaaaccccgaagaataagtaaaatacacgattttaagagtaagttttgataaactaaaagttcgataaaaatcttgaattctatggttctaagacttttaaggtatgcaaaacaattagcaatgaaagtgtagtgtaggagaatgtattatgatggcttactctgaaagaagagaaagggaaaagcaaagatttttggaatattcagtttatattggataaaggataagtgattctcttttactgtccagaggaatgcatgccagcatctcagtttcatgctcattaattaattaattaattaattaattaatttttattcatcccagaggtttcctcttgggaagggtcggctgatgtttcagtcgaactttggtacatttctctttggctctcttattaatctgatcattttgctttgtgcatattagaaagctaacttggctcttaaactgcaaaatatgctcaatgtgcacattaaattctcctggcaagaatcttcccttaacttatttgtttacaagaatgccaacagcctgctgggtaacattgtagatcctttcattttgccatggcaacattttaggctttaatttatttattttttgatgagtaggatctattcctttgatgtcaccttggattttgttgattctcttgtgtacagattaagaaacaactccatgctttctgaaagagctagagaatatactctttttcctcttttgccttgtatttgacaacattctgaataacagacagattagcagttctgtttaaaattaaatctatgattttctttaatgacatataaatttatagctttctgcctgaaatttaaacatgcataaactcttgaatttagtcaattgaaacacatcaatagattgtaaattaaggctaaagtttaaaaactggatagacaatgtacttgttgaaattagtattaagaacacaatctcaaacagctgcaaggaatttaatttaatttaatataatttataagtccattttttatttcggataccataaagaaaaattcaaagcatgaagaggggtgaaaaatctctttagttcatctttttttttattttaaaatgcttaagattcacttgtaatgaaatgagcagggttttaaattctaacagcatatatgataacttttagttttcaaaatttgtcatgtaaataataacattttgttaatctcatgtaggcattaattactactttcactgtagtttgaaatgtcatacgatgagtgcttctgtttccttcatggcgattattttcagttaaaactggtgggctaaaaagcaaaagtatagtgtaaaaggaagaatgtaaattcatagaaatgaatgtatttacttcttagtcctggtgtggtggcacatgcatttagtctcagcacttcaggaggcagatgcaggaggatctctgatttcaagaccaacctggtctacagagtgtgtttcaagacagccaaggctatacagagaaacaatgtttgaaaaaatgaagaattcatttacttctatgagagtttctctatgtatttttgtttttaaggtagacactatctgacatgccaaaggataaattatccaatggtaaattactagtaaactaatgagatatagatatagatatagacatagacatagacagagacagagacagagacagagacagagacagagacatagacatagatatagatgatatagatatagatagacagataatgtaggctctgagaatgcttcagtttctattaatggataaattataatgaattttgaagttacactaattttaggaagtagtttgtttcatagaaacttattttgtatcaatctattatatataatcacatgtgaaatttttctattttaagtttctttgatgaaacaaaagttagccattttataattttacataattagtttaaagtatcttaacgtttccttgtagcagttttatttatatctaaagtaccagtcttgagtcaaacatttagtggttatatatctaattaaagaatatcaaagaacccatgatcaaaagttttatatttattacattagacagattaacaaattagaagaaaaattcttcatttcttaaatataaccagaaaacctaactagggatagaatgtgtctaatagtatagaaaaggttgatttttcttcctttgaatgtttattagctattcacaggaagttattaaaaaggggggggggtgagttgattttctctttatactgatttgtcccattgagcaggagtactggtaatctatcctaccgagaacaacagtctttgtagattatggtatgtggggaattagcaactaagcaaaacacacaaattaaggaatcaagggcatcataaaatgtattgcatcataaaatctacttctgcttctgctttgaaactgtagtttaatttatagtactgtgtacttgctggggaactctatcatagttcattttgttaaaaataatgaagttgaagctatatgggctttcagacatcattgtgccaaggagagtagagcagtcaatttatcttttcctgtccagttttacaagcagattcataacattcttcctattgagaatatagaagttgttgcaatcctcagtttgtccctatgttttttattacttctactttacttaataaattcttcaagaatgaagcacgctcagaaaactcagtgttcaaatgaacaacgcacccacaaatgcagttctttgtgatacaacttactgctttactgaagttaattatttttaataaattgcatatattagaagtatcctgttgactgtctagggagcaacttgactgctaaaattcctcttttttcaagcatagggattaattctttgtgatgtattatgaatattaaaatcataaatatataatctaaatggaaaatacttgtagcacttcttcattctggagttccattgccagtgctgcaaaacttaactaagtgatgtagtatgtggtattgccttctttcatctcattgggtggtagctgttgttatatcagcaaatatcgacaagtattaatttctgcaaaattgtaaagttggcaaaacttgccttcaaatcttactatatcaatacttttatgtattattttcattcatagattgcagttcagtttttcatttccatcttctactcacagtcacaaacacaccatgtacacatttaaaagacttagcactcaaaaaattaattttatggggttgataaatgggtagattcctttccttaatttcttttacaactggggtttttacattagttaatcttcagttacagtttctctgtatactttctttcatctctggtacagctataggtttgtacgtgcctttattttcactaatgaaaattcatagcattaaagtgtaacatatattttaagtgaagttgtaaatagtactatgtattatgatgtcagtaaactcttgtttaaaaggaacagaaaataaagttcttgtttgttagcagcaaatggcattcatttattttcttaatattcagatatttacttatctttctatttatatcatatgtaccacttcatctattaatgagtatatttcaaatttaaaaatatgtatgttcaacaatatcaatttttaaaaaaaaataatatgaggggaaatgctttatgacatattttctgtttgaggtattttatgaaaaactcatcaattgaaagattttcttagtcataaatcattgctgagtatagaaatgttagaactttataaaagtgaaaacaattttcctttctagtctgtcttatgaaaacacttaaggcttataaatggtctatgcttggagtattcttcagaattacaaataagtcaagaaatctaatttgtatgcatcggctctcctgcctgtgtttgtgctggctttaagtagcagcatagattttaattgtgaggttttaagttctgcaattaaaatttaccctttttactaagggggttgagtgatagttttttatttaatttagacagtttagacaaattatatttaaaagagcataaagatgcacacagcatttcccaattcagagaaggtcaaagtgtctcagtcacttttttttttgaaagttttaccttgaatagctaatgattcttcctactgtattgactaaatcttgtggaagcaggatgtcagactgctttcaaacatcaagtcctttgaaatcaatggccaaaatgaccttgaacacaatagggaacatgatagtttatatcttatgatgttatattgaaatcacaatgaaagatgcagaaatagattacattagttgtgcctctaaagatgcttatatttcttttctgattgcttttgtgtttataaaaataatgaaaattctttgcaaattatgagcaaatttgtttagaactttgatcatagcaaaagcgtaggagaaattccgaagacagatgtttaactggatcaagagagaccataaaatagataattctggtcaataatgaaagtgaggtcataggaaacaactttattgaataacagcagaaatacgatctctttgagactttaaaacagaacacactaaagaggtattataaatgtgaactagcatggaaataaatttctaaaaatataacagaaagaatagaatttcaaagaagtaggtctattaacacaagcaatttgacatctagctgacatagacagactgctgattgtatctgacgtctgagtcttggttaggaagtgataccatttatacagctatatatatggttatatatggttaggataccatttatacaggtatgtttacttagatcaggacatgtcttctgggttaaactgctaagcaggggagatgtgttaactgaatgttgttttagttcaaaggaaattactcagaaaacattccttgatgtgtttgatacttgtgtcagggaagcaattcaagggacgcctgtgaccatcaaggttggagttaggtgagtctgttctagctttgtttctttagacaggatccgtaaggtcggacaaagacactatgtctgaggaaagcagagatttcgaccaaaaagagatttaaaattgttgtatggaagtaaaaggttgttatgatgtatataaatttaaaaaatgctttttatctcttagcttatagtgtatcatgtacctaatattgacattattatcaatgttgtagagttatcatcgccagtggtcagttagacctttctgtccaggaatgtttgttaaaaatggaaaatttagctgaaaaaaaaataacaacaacaaacaaatattttgtggccaagagagaacaaaatttttatctctctcacacacacctctgttgtctgtgtgaacttgtaaagatttgtgaagttttctgatagttaatggcaaataacagctgctatttttacatattcaggcatctccttcctttttctctctctcttttgcaatctgtgataaatactggcagagcaattagaatggcaggggagctgaatgtgtgaaggaccagcaaacacggggctttatcatctattttagtctctctgaagctgcagtttggaactataaatatattagcaagtacctcctggcttgttctcatgcttttgttgttatatataagtctagcattttaagacagttgtgaagtcaacatgaagtgtaacctgtgttgatagaatggaatagtcctgatatcacttcttgtttcttttctacagaaaagtaagttccttgggtaaaatttctaagtaccagacatttctatcttacctttctttctattcagacctggcatccacccacccgtgctgtggacttgccctctacttcctgtgtcctgggagcccatgatgttatccttaccacatttcctctttgaaaatagaaactcatctcagtttatgatccctagattcatcatcagctgatggaggaaagtaagtcattccagtatgtgaataaaaaaagtatgtggtttttggaagggttccatcattgagaagcccattcagataaatcactatcatcatgaagattttatgtctgagaaggatgatgataatatgttaagacacaagaggaatatgtgggagcaggtaggccaggagtgtggttcaataccactgtgagctgatgttcatccttgagaaatataacgaggaaattctttataatctggtacactgcttaaatcatatgattttgtcaaaatgccattagcaattcttaatataatgcacatttattgcccacatttttatagttaagtgttttattgagaggaattactaatgctcacaagacaaaaaaccatcaaaatggagaaaaaacatttttaattatttaaaataaagaagaaattataaggctatttctcttacaagctgagaggattccatggcaactaaatgttactgtttagtcccaggttatctctcatatcaatgcttcacaggagaaggtaaaaaagtatccagtgttgtgagtcatgatgtctcacaaattccactcaagtctcttctaaatgctgttgacctctgtgactaaagtcctgttcaatgtaaaacaatcttgtttaaaatttcttggaatagtttcatgattataattaatatatgatttgaaaaatagatcccttagaaattgtcctagataatcctataataaaaaaaagtgatgaaaaaaagaatataaaacttactgaaaaatcaggttcacattgccatcacctttctaatctcaagaatatttaaaaattacacactttgtgacattgttagaagagaaaattcagattgttgtccctcctataggggaatgccagggccaggaagtaggaatgggtgggttggggagcagggcagggggagggtatgggggcttaggggcttaggggatattatttgaaatgtaaatgaagaaaatatctaataaaaaataaaataaaaaaataaaaatttaaaaaaagaagagaaaattctcccactaggaatgatcgaatttctatctagttaaagacacaattaaaaaaacaaacaagaaacaacacacgttttctggaaatctagtggtaagccagggtaattcagtatatttccattctgtatttctgacatttacaagaatgggagacaaagcacaaataaaacattatgtgttttcctcaaaaaacaaaccacagctggtgggtttaattttatctctaccagccatgacaacagcctttttaaatattgaatgtgtggattcaggtttctacaaaacatttgccacataaatttctttaaccactattaattatatatgaagtatcagaagtgtcctggcctacttgtggtggtttttcagatagcaaatgaggaatattctgcagccattgaaactatctaatgcttgtgacatcttgtcctccaaatgaaatggtagtcttgaagactccttcgttctgagtcttactgcccattggtgactcttggacacaaattcaaagtgagttgtattgacaattgtggggctctgcagcagaacttttcctgatgcgtgaaagtctgtttatgtggtttgagtcaatggcccttcgctacatatggctactaagcacatgaaatggagcaaatataattaggaaattactaatctagctggccatttctgtgtcatgctccatcacagaaaaagaatgtcagtgttcttacggtgacaacgttagcaaacaaaataaaatttccttgtgaataaggaagatagattttatatggttatagctcacaaaactgtaaggctttagatatatcaaaaatctcaaacaatacagaggatcagaaggaagagcagaaagaaacaccatgtctagtttgcagtgggagacaaaggattatgggagtagggattcacacaaccattcttggtactttagcagatagaacttctttataatgacattccagatgctgggaaatacaagcaaaaaaagggctttggagagttgaagacacctcaggcagttgttgttgaaatttagttaaagtcaagacaggggccttgagcattggctgggacctaaagagcagaggccaagaatctcaggtaacatacaagaatctctaaagatgttgaagacaaagtaggagaaagtgaattagactgagaaaaaggtaagagaccatggtaattaagaaagagttgggcttggatcaagagtgttatcttcccattgctcttgttattcaaattagaatgcagaaaaacagataggaaagtcagtcagtccccctgcacacctgtgtccttcctggctcagtgcctaattacatttatagtgatgaattatgtagagcttagtcctaagcacaaacaggttgtaactgtcacaaaatgcccaagtctctaacaggcttggagctaccaagggtggttttcaaggaaggttatgtcaggcctgatttcaactttagttgcatggaacatgattggctgacaaggatgactaggaaatacaaatttcctagtttttgtaagttgacttaagttgtgtcactgttagttgtcagaaatttaaaccctttcccacaaaatcattgtctactagtgttaatttatttttattgtttgcaattaacttttgaatgaaaacgttagatacaatttttttattaggtttttatttcatttacatttccaatgctatcccaaagctatcccaatagatacaatttaaggagaaaattttaagtgtaaaggtgtgtgtgttcagggtatttttttctcatgcatagtggttatatgtttttaaactggaaatttgaaactttatatgcacagacaagtgtctgaacttggtgctgtgtaaaattatcatttaaactatacctcagtttaaaattgtagatctaattatgaacattcaaacacagaggatagctttcaaattctccagtaactaactttgtgaaaccaaacacatctgaaatatgcatttatatttgtaaaactttgtcagacttttaggaggtgtttgttaagagcagttgggtaatgaaattgctaaacaggatgtgaagcactcacatgggatcttgcacatcttcatgggataagaaactgtagatggtttccacttattcataagtgttttcagagcgtaagtgggcatttcattcctataaatactcttcgctgatgtatacatatttaaagaacatattttagaatgtaaaaggtaaactctaaatgtgttcagacactgaaattttaaccaaagtttattatcaaaaatggttttaacataagtagaaaactttcaaacttcctatatcctcgatcgatataaaacaagggagacagaagaatgtgtttggttcatctgtttggttaaatgtatacaattaggcgttataagtctcttaatgtggttgttgttgttgtttttaactgtgtttggagatttgagcgcatctcagcagacctctgaggattgtagcagatgtagatgctgagtccatttgtcctttactgtgaagacaatgccacagttttatattcctagttcatctatttccattgttccccaaactgtaactctcttagtcactggatcttcttagttttactcactaggattccccttctaagaatttatgtatctgttatttttctattagcgtaaatatctttttctttcttttctagatgtgagagatgtgcataacacatcacattttctggttgctggctacttttgctaactttctacttgaatgttgaaaacattttataactctctcagtaatttaacttctccataacagattcaatatgccatatttatattagcatatgagttaatactgattcagactgttatttagcacataaaaaagccaaggcattgaatagatctatgaatctagctactacttgctatttagatatgcattgatatatttttggagttcttttttttcccctctcatgttgatagggtaaatttaaatccatcctagaatataagaaaaataaagtatggtgaatattttttcttaaaagcagacaatctgaaaggattaaaatgctttaatcagacagggggaaaaaaaggctttggccacttgattagggctgatttccaccatctgcttgtacttactaaggatctagccctgactgaacactaatttgtgcacttcctagaaattgaaatctctcagcaagcaaattaacaagagcagggcttcagcaataatgcggctcctcggcttttgtttctctctgacagatggacagggtgcgctcaaattgaattcagctttaattgcattgtgccatttaaaattttatctgctccacagattttgtttacaggtttcaggattccaaacctttggaagtccttttttttccctctccctttcttttcttttctttctttcttttcttttttctttctttcttttttttcttttttcagaattgggtgagataaagaacattgtaattctatgtgactgggaggtgttcattacaactctttgccctgaaaggtggaaccttaagaaaaagaattatgttttaaagtctgggacaaacgggaaataattcaaagtttgcgtatgttcaaatattggcacctcctaagtcaaagtaatcagaaacgctctggtttgtatctcaataagaaagtgatctttcttgtttcaattaaagcatttcaaactttgcttatcagtagatcacttagcgctgtgaactcctgaattctagcgataaagatgtattttgtaaataaaccgtgattagagttacttttagtttccgtttgattgacagttctcagatagagctgacttatatgaactcccctttagagcaaaggtataaaatactaaatcatttgggcatgtcctaaacagtcctctgaagctcacactgaagatgcatttgttgcaaaattgcttgtcaatctacaagcatttcctcataaatctatggcttagtaggtactaaactctgacattcctggtggcaaacagggatcctgaaagcttaaatataccatcataagatttgatttgcaccctatttatgtgaagattgaagacgttttagcatgtgaacaccttctcaggaatggctgaatttggtttacacgaagtcagataaaataggcagacagcagtgggtaagacatgatggcatgtggaagaggaagagggtttggttcttaagactaaagaaaaattagtttccttatccatacattacattcacgttatgtgcacaagaaacctccttaacatgtcttatttattataaattataatttgtatttgtttatatatagtattattcttcttaagaacaacttgttagtgggggtattggcagtgtctctggggcttcagttaggcctgtgtatatatggactatttttcaaagggaaccttaatttataatcagtaattacaatgacataataatgacagtaccttaagatttcaatatagtagcaaaattgtattaatttagcatgcagacttcttgataaagcagctgtagtttagaaaactggtttccattttatcatattgggtcatttaatatttctcagtgctctgagccaaatggagagtttcaggaacatgaataagtaaccaagtatagatgcatcaggaaacatcatagttttattaaccttagggaaatctatcccaacagttctttattttctgtgtcttcctgtctgtctcacaggcagttgtgagaaaatttgttgcttcaaacattgatcattcttatcattaaataactttaaaagtatgagggacttaattttcattaaaacatgctaggttcctcaaaaacaaacttcaccgagacccaaatacagaaaactggaggtagaatgcactcgcttgtcttagggtttgcgttgagtgttgcatattgtactattttattcggtatagttctttgtaactgccaacagtttccttctcaagctccttttccttctttcttcccgattgcttttagaatcaccattgacttacgttagatccttcctctgtcatcattctcacagagaactgagtttttccatgcccagagcacttaagatgtcgcggagatagcaagcccagccccatcttatagataagaagactgcactcactctgcaccaggctggggagctctggaatgaaccagtcttcaattttagccctcatgaatgtcttactagtaattcttagaaacattaaagtgttttttttttcctctgaagccccttcaattattagtatagtgttcagtataaccacaaagagaaaatatagccatggacaccactaagaactgtgcagaatacacagacataacatttgcacaatcaaataccttagagtactaatagtttgtcattgccaatagaaacaatgaaggttgtattaatgattcatgctcatactttctttcctttatcccttccttccattcatttttccttccttcatttttcattcctttcttttcctttttcttttttttccttcctttccttcctgttcttctaccatacactcagagcttgggataatgtatacatttgcagtctttgcaatttgtagtctttgaatttcaaaagctgtataaagcatatgagcagcattaggctgttttgacttcattgagaattccaccagagaggtgccaatgggtgtgctggatgagtcttggtctctgctcttgccaacagggtggtgagagccagtatgtgctatctgtcttgagtgtatagtctgatacaataatgtcattgccccatgtggcaaatggtgtatgctattgtaaaactgtttgtctatgtgattaaggcattgctgcagtgtgcagcaccagccaattacttttataatttaattatagcagaaaaaaagagaatagcataatagaaattcttgtcatagagaatatgtaaagtgtaaattgaagagccatgaacatttcatgcattggcagcctgatttgtttttattttcaacttgttataaagctgtgtttattcagtgtcataaaataagatatagtagcatttagtaattacttagttctatatcaaaataattatatagagtatgcacttgtgatccctccactctgtttggatgtgaaaataaacactctgaggcctgtatcagtttttttagttttagacagtgtaaataaagctgaatcttcaacttccaaattaaaactgataaccttgggcatcagaggtttttataaaggaagggggaaaacttagcttgcctcaaaacaggttgtgtctctggaatgcttctgggactaaagagatcaattaagtatgtataaacaaacagttggaaaaaagctactaaaacaacagaggagagagctctctattgggccccagaggcctgggggagcgaagtttcattaactggatctgaagtcctatggccttctataaacaggcattaattaaagaatgtaaaaaataaaagtttcagaccttgcaatatgttaatgatcatatgattcagggcccaggaaggagaggagcagcagaggtcataaaataagcatgaagcatttaatatgagtgcttggcagggatttctgcaaattagttggttatttgctggtccaaagcaaattaaggtgattttgcttcacttgctaattttttatgtgcatgcctggcaaaatgtttttcacaaatggatgaaggttattgttaatggcataatgagaaatattaacatatttaagtaaacctgaaaatcctggtgcagagcacaaacatgtagcttttattgaacagagatattggcattctgttacatactgaagatggtctgagcaaaaattatggaaaatatacaagttataatacctgtcattatgaatgtatctgacaagctttgttgtaatttaaatagcacttttgattattcatagatatgtatgtatatatatatattcatatatacacatatatattttttattagtacctttttttttcaaaatcagcattcatacttgatttgcttgatgttggaaagaggaaagcttttcctaactaccttcgaggcctatgggagttttcagaggtgacattttttgaaactctggcttcagtaactgcttggcctgatttctcttttgtttagttttctgtacatattttcatcttaagtttggccatgccaaactgatctcattccccttaagttggttttttttttttttccccatctgggttctcggaattcagttaaacaattgtagtaatgtctgcaatgaggaaactcttttgaaattacagtgaactctttctgtcactttaattaccatgaagtggcagagaagtactgaatttggcaactgagccacatacagaagacgtactgaaggaagatgctcctattgacattgttctgttacagcaatttagatggacaaattgcagttgagaaaatttcatgactcggtaaaatgagcaatgatgacatctgcggatgcgggtctgttcatatctttgtagagcctttagggaaataaatatctcggaacattcggtgaagtgaagctcactcaataaatcaacctgacacaataacacttctggcccacgagccactcttctcctcagcaccacctacccctctgtgttcctctgctaccaaatggtgtctccccataggcctctaaatcaaatcagcgcacacaaatacagtgagaatttattgggaattggttttgttcggcaaaaacattacttattagatgaactgaaatgataataaattttgaccctttaagagctgagccagttaaggcaatggtggtggttggaagaaggcatcatctcattagctgtatggttaacttttactatggttaaaggtctcctacttagttcttttcgtctcacgtaatgtgtcatgcaaaagaacacattttctttttaaaattctttagcgtgaacttgacacatttgttggtgatattcaaagtaagaagcaaaatcttaactatgtgcgaatgtgtctgtgtatttgtacatgtgatcacacacgtacttaaagtacttcaaaagtgacattattcaactaaaggtatctaccacagttatcacagttactatacataaataggaaattgagaaaaattgacgatgtatatcagcaacacggatggacaaaaatgtatagtttgttttttaaacaatttcccatgattaattaaaaacaaaaaataaacttaatttttactagtaaaatgtaagttgaattttgcttttactataaatttatttcatttaagataataattaataggagaaatcagtttcctaccctgaaatatttttagagctaatggaaaatcaagtcttataattttgtttatattcctccaattctgtgagttgtatgacttattactttttgttgataggatgtgagaaagagcgcataggattcttttctttttttgtatgactttctttatgtgatttattaattagccccagtccttataattattttgaaatatcatatttcccatgtgcttacttgctaagtaagtcacatttacaataaatatgccctgggagatgctgaaatcattctggagggaatatttgtagccttaaatcattaagctgaaatatattatggcgtttccagtgggaattattgatgctgaaaatttgttagtagttcaaaagctttataactaatgaaatttgaaatgctagtattctatatgttattaagaagaagaaacagtaaggtttttatcatcatgaaaatttacctgcatgcagtttgggtcaataagaattaattccttcatttttatccaatagaaaaagcaagtggtatgttttagtttttattgcattccactgccaaaatgacatgatctattgttcgacctttttccttaagagagcaacaaacctcaaagatgttttaggactttgagatacttttcagaattaaaagggaacctttttctagaatgatcttgtctacaaatataagaaatttcacaaaataatatatttttaaaaatttttattatgttgctacagctgtcctggaccttgttatatggaccaggtttgctataaattcacatatatatgtctgtctttacctcctgtgtgcaaggataaaggtgtctattacattcctacaattctaggaaacaaacaaacaaacaaacataactttgctggaaatgttgagtcacataacacattatctaaaagtattttcatagtgcttagcacaacttgtttttatgaattattcattgtggttataatcacatgagccactttctatgctaggctaaaacatgcattttgacagatattagcacgatgttagagttgtaatatgttagatttgtaatgttgaatatggaagggcttaaataggttgtgcaaaattatatgtcctataataaggtaggaaatcatgcttgttgatgtaagatttaattcctttctacattttttgcaattgagcacactatcctggactcttttcctatgttatattttgtattaaatgcatatagtggtgaatggaatcttttcttcttttgaaggaacaaacttagagcattgtgagattatagacagagttgaccattatttcttagagggatagaaggtctgtgataggaccctgaaggagatcttggctaggatttataagtaaaatacaaaaaggaacaagggatcaggaatacaggcatgatacaatgtggtgatatcagaacttctggcagtgagttgtacagatcctgagagaagcactacaaggcagagcttagaaaatgagttcactcctgccatttaactaccttaagcagttaggctcattagtgccttgtctttagcttgaagggtgatttctgttgcattctaattgtttctcttgataagtggaaaagcctatttaagcacatacttccagacaaataacttttgatagaaattttgatgatatcttgttccatactcacatccctcaatagcataaaactgttgattgtgaattcaaagatggttgacctaaatttcttttaaccattcatggcaatctttagaaaataccactatattctaactctatgattccaaggacttgaataggattattactttttgtggaagacaattttatactccctcaaacacagttcccatttgatgtatttttttttcttgttctctaattaaaatggtggaaagaagtctttgtgcttaatgttaatccatgatttaaacattagcataaagaattatcacattttctcttaaaattgttattattttgaaaggagatcgataggttcagaagacctagatagactctagttataataatggaacatattcatagatagatagatagatagatagatagatagatagatagatagatagatagatagatgataccatgttgattggccatattaggtcagttctggctggctcttgtattatgtgtaattatgcactgggaggtggtgcaggaaaattgagactgaaggcttagagaagtctggataaaaggtcctgctgctgagcaaatattattagttgtcagttctgagatcaaagatgtgtagattggtttgtctgtctaaaataagagtctcctgctgccacttcttagcacccagtccttagttgagtcacacaattactctaagagttagtttcctacttataataagtaaatgggaagctgtctatatttcactataacaagcactgagttgtgttttccaaatacttaccaaatatctaacctatcaaaaaattctccaaaagaataatttagaaattaactgagtcagaacagagcatgctcactactagaagggtgatctgtgttcgatcttaccttcttgctttcttgcccactatctgtgtatccttgggtcatgttatttaaactccattttctcacttgaacctcacaggcctgaaagcaaatggagcaactgatcacctggtcagttgctattatgagttttgttcttttggagtgtgagttcagggtgtttcgatggaaggatgcttagatggaaaagggatcaggctggatgtctagatttttctccttaatttaaagctctgaagagatttcgtgtttcttttacaagagttataaagaaggaattaagaatcttttaaaaacagccgggcgtggtggcgcacgcctttaatcccagcactcgggaggcagaggcaggcggatttctgagttcgaggccagcctggtctacagagtgagttccaggacagccaggactacacagagaaaccctgtctcaaaaacaccaaaaaaaaaaaagaatcttttaaggaagtcatagacatatagacatttagttgttaagtaagtatgctctaaggcatccttctttagccctttagactcccaatctaatttcactctaacttaatcactttatatgtactttcttgtgtttatcaatattttcagttaccctatgaaagcatatacaacccaatcatttgacaattcttcattgaattggtgagttgattagtttgtcatgttttggttccatagtcctgttgattatactcaggcctttgttattgctacccaagcactctgacactgagttaattctgagattaatgcatattgtatatacaaccaacctaatagtatcatttttatggaataaaatagaaatggtcactatagtaagaatagtgtaaggactttgtcataatcaacattgttacttttggagtatttctcaatattcagattctaggcaagtgcatgcatgcatgtgtgtgtgtgtgtgtgtgtgtgtgtgtgtgtgtgtgacacattttagaatctgtttttcttctaaatacaataatttttgttcttccttaagttatatttaatgttttctatttgaatcaagtcttagctctagagctgaccacagcatgttagttatttttttaataggtctatgccctatgcaaaatttcattgtgacagaccagatatgaaattataaggaatgccaacataatattagcaatataatctagtaaagtagcaaacagaagagagcaagaagcctggagcaaaagtatctgaaatggtaaaatgtaagaagagtgtcaaagacatttgcaatcatgcctaatgagtcaatacagccagagtagcccttggtggaagggagaacaagctctccacagtgaacctggctttggtagaagcagaactattgagagtctgactgacagttgacctcaacctgattagtactgactgtgtgaaagcaggaaacttcattggagaaatctgcttctctgtccactgagatgtagtcaggcaaacaaacaactaaactaaacaaaatcaaaacaaaacaaaaaacttgaatcttcaaaaagaacttcattgtttactaaaataacctaccaaaaatgaattcacttatagtgttgttatttttacaaatagcttcacactagtattatgaaatcaatgtttaagaaaataaaggttcagcattagtatcaatagataatgttcatcaatgttaacagacctctgaaatagtaaataggagggaggttcactgactgctcacatatggcatgttttataagcaagcacagagagtcaatttgaagactttagattctagtaaaggatggtcactgtaaatacactccagatagatttggctcattaactgaacacacatctaacaccatcttgggaagtgtctggaaatcatcatcacatcaggatgttagtcagccattctgttattggttattcctaggaaaataatgggtcatttcatgacctaataatctgagtttgtttggcagattttatacttcaaggcctctatgaactgttttgtaaacttagagatagttgctttgatccaggcatagaataaaacaagaacacctactaaatagcagctaaagtgcctttcatctttccttcaaagcccaaaataaaaagaatcactgcaaagtaatgcgtttcttgtcccttagatttttaactttcttgattacttggaaatttctaacatcattgactcccaaagtcaatagtattagaatttcttccacattagagagtctgaattaaaatgaagtaaatatttcaataatatgttttttttgttgcttttaaaataatcctcctgttgtcacagtaactatgtcttaaattttatatacataaatttattaaaacatacacttgtgctctatatttcaacaattgaaatttctcccctaagtatagaattctcaccagatgtttattaaatatctgtgcatagatgcattatgccttgtgccaaaaagtaacactacaaatcaacatcaagagaaaagtcaggttgatgacgctgtttttcttcagattcatcactgtgattcttggtccaaagggggcagctctctagaatggatccctttggctcccaggggactctagtgaaacttcagttaaacatgccaaccttcatggtggactcactaaaggcatatataggttctgctaggacacttatttgtgtttcttatgcactgtaagggaaaaaaaagtctgtttcaaatcctatttgtcccttatctctgtttgttcagttgtttttaatatcacacactgaaggcatttcaatagcagttactccgtgagtcatttgttttccttcagcaggctgttgcctactgaattgtaaaacagctctgactatttgcatcctgcagatggagcggcatataaacactctcagatatttctggtaagtatgaaaaaaaatatcttatttgtcctttctgtgaataaataagagagtgtcaaattttatagactaataaatttatatgccggcactgacattgaatctcccatggcttgctatgtcatagatcctgagaaacactttcctttttatttcagatgaattctaagtcaaatagaagctcaataagataaaaataataaaaaaaacagaatttgatttcattgtttatgtctgcctaatattctaattcagttgcaatgtgctatgaggaaatgcaattttcttgcttccccagcttattactcaacagtcactcacatacatgctcctgtatgtcacagaggtttctactaatgagttaaatgctctttagtatttactttgcaatagttgtgtccttaacagatctcgcgttaattctgaaaccatactattgaagctttacagacaactgcttataaaaagtacatctaaatatctaccctataaatgaaaacttttgaaatatgtatatgtgttgacttagggacccatgcaggtcagactcagacatagaatcctacatggaaaatactggttcatatcagtccacgagaaagaaaatctttgttcttgtccaatataggattaatttgtgttttatatctaaattgggttgcatattttatgctgtttagtttttataatcagtcgaataatgaacctgtataataaccatcattgatagcttaatgctgattttagggttgcaaaatataatatcatatcttccaacttcttcatgtatttctctgtgcccccaaatcaataagttatacacttcgtaaagtaaataagaagaaataatttggatgtcagtttgtgtctgaagcacttaaagattcactttgctttctttactgctatgagcaaaaggaagtttctggactggttacaggttgctttctactcttctttcctgatgttaattttaataagaaatccacgatatttcttttttcaatgtgacataaatacaaatcttattttatttgtcagtttttatttgatttctggagactaaattttgttaaacaagggatggttgaaggaaagtaaaaccgacatatagacatttagaattaactttgttaatgttccaaatgaatgcttgtaagcgttcccaaggcaagttcttcttaagttactgcaaaaaccctcctcagctcttctcggaagttatgtcatgagaaaggttaatgaactctgtccccatgtcctcgattgtctcaatcatcgctatcaataatcaaaagtaacagtatttgttgcccatacagagaaataaaaggatgtgtctgtgggcgtgtgtctttctaaagtttgctataccatgtactgcatatgtgtcttcccaggtttaattttctaatttagcaatcatcattgttgattctaaattcttagatctagtttatatgtgtgggtaaaaatgttcatgtctctgcattattcagaaacacggataaaaacaacaggtgtgaccagaggtggtttgagtagtcctgcagacttaatctatgtaaaataacagaacacagcagatctcacagttgcgggttttagaatcctgaatttccatactgtttcattgagacagttctgatgttagcttatagctttagatagtctttatttatttttattttttgccatttttaccacttctgtgttagggattccattgagtaacttacaagtgctaaggaagctgttatcgatgaaccaaactctttggctaggaaagcttagtggccagtcattatctgctaggttactacatcagttatagcatacaaattagccctaacatatgcacacaggtataaacacactagatacacacatatgtatatatgtatatatgcataaacacacatagatatatacccatacacacatgactatcaaagggtcactaaattctacgtggctgtgttactgcacttcggaaactgatttcaaaccagagttccatttgaagttccatctatcctttgcgtattgacataggtcctccagagcttcattcctttgttgaggagtagtcaatttgtcagtaagagatgattttccagcctgccttcctctatagagttcctcaaaagtgaatgatgattatatgcagaaacagagaacaaactacagacacaagcaattatttaagtctgcagagctatgaatcttaagcttagtctttgataaggagttcacactaaatttaatgttacagaggagtttccagctgttggcttggtatgaaggagtggagcatctttatgactgattactgtcctcaggagaagagaagggaagtggagcgatgctgtgtctttccaaggcatggagtgctgtgcatattctgtggcactgatttgagaaggctcataactttaatggcatcctttatcagttgtcatgactctaggctttgaaaccgctcaaacctagggagggacaaaaaagaattcgtgtcaccagagatacagagataccatagcataggaagattatccattttagaaaatttcacattgacgcaaagccacttgtggcttgtcactctaggtaaatgacacatctagacttcgtttgccagctgtacgtaaagattttggctttatggtttcataaaaaaaaaagaaaaagaaaagaaggatgtcatctattccttcaatcacttgtaagtcccctgtaatcctttattcctgtaagcacagtggagtattcccttttgtttgcggcccctgcattatttactttgatctgctgtgagaaagtctgaacgtgcgttgtcctaaatgcaagcatctcaccaacaagatgtgaggccttgtagttcacactgaagaaagggctctgtgtgcagaagcaggttttgttcctgccctctccctggtgggagccttaattgcatttttctctctctcacagtggctggctaaggagtgcctgccttccctgctgatgctgaagttctcaagcgctattactctgtgatgaagaaaattccttggtcaagctagaaaagggtcagatttattttttaaaaaagaattgtttaagtttaccaagtacaataaacaaaaaagaaacaatataaaccccctttcctctatgaaatttgtatagatattttatttagcacagtttataagttattacattctatatactaggaagaggctcagtgcacagaagttagatttattaataattagaaaacaaaaagtactatgttttgtgttattccttaaccatttttacgtgattaaatatatatccatatatatatttatataaatattgctaattactggcatgaatgccattttttctggtatgttagggattgagttttattaaccttgcttcttgttgtgcttattttgtgcatagtcaacatgtttgagtcatcagagtcgaaatcactcttttaatttgcttttcctttgacaaactattttcattctcagtagctttgaagctgacactcccaagtccattttgaatttctgtatattttataagaggcaagaatagcatctgcccaacatttgcagtttcaaagtgtcctaaatatggaagctgtactcatctacattcacaacagtgttcacttattgtttgaggtttaaatatttcatgtacatatgtataagctaatcgcgctttaaaaaaaaaacatgtcttgtttttccagcgaaaatagattacccaagcatatattttatttggcaagaccgtatttcattcctgtggcttgcttataagtcacagatcctttctgggccttacagcttgtccccgtaacataacggcaaggttcttcactaacccattccctcaccatttctgatattcaaactcctcaagtttgaagatgcggctcatcattgtctgtctttcctggtacgatacaaatgttgaactatctggtatttgtcttctatttgttaagaaaagggctattcctgttcagggatcactgtgggattttggcaaagggagttgagggggcactacaaagacatatgggtggaagtggcaagggattggttggtcaagaaggaaacaagagggaaaatagatgttaggaatcagaatgtgttacaatcaaaagacatcatgttgacatcacatttctaggagttgggattaagcatcttgactaaccgtatctcctactagccatgactgggcttataggccttgtaccaggtgtgttcatcaacacacccagcaccatcgtttcagccatcataaaaagcaacgatgaagcacatgacttgaaaacatctcttggatgcaagagtacacaaggttttatgaatacattgacatcgtcaggcagataatactatcgttaaaggacagcagtggagcatcaggggagagctcaggcagttaaggtgtttggtgccaagcttgaacacctaactttgatctctcagtccttcttagtgggaggacagaaagcagctctcctcaattgttctctgacctctgtgtgtacgtgcgcacatgtacagcgaataaatagaatgatataaagaatatcactctaaagcctatggtttgctttattcttttcaaacggctccccagtgggaagaaaaatcttcctagaaactgatttcatcgccgggcgtggtggcacatgcctttaatcccagcacttgggaggcagaggcaggtggatttctgagttccaggacagcctggtctacaaagtgagttccaggacagccagggctacacagagaaaccctgtctcgaaaaacaaaaaaacaaacaaataaacaacaacgaaaaaaagagttgaaactgattttatattagtgcatgttttaaaaacatggatttatttttgtttgttataaacagagtgattacattttctaataatgggatttgccttttcttcactaaatggttaactaaccaacaagaaggacaggcttatatgactttttttctatctagttagtaaaaaatagaataaagtccaatcacatgaagaaacacgtcaagatttcaaataacttttagcaatatatattgctattatatatattatacatagagtaaactttaggataggaacttagtggttcagaatttttgtaatttacaattatttaaattgaaaagtagaagcaaactgtagtattgtgttcctagatcatcagttgcttttttttttattttacctaaattctattttgtgttcttctaaacttagatttgcctcgtattgctaaagattcttactctatgtatttatttcatcatgagaaaatcatgccattagatcagttcattgccaaggatatctaaataagttgacaactgacttttctacttatcggtgtgttttattctgataaaatttctttatgatgaaggctgcgggacctgattatttttttaaataggtcaagaaatagatcagaaactcttcaggggatttatctctgttttgagcacttcataatgacaaaactttccttgcctaatgagcgtgtcaagatgaattcaaatgtataaagcaaggggtagaagagggcattgggcttctaagagaactgatctaattgcaatgattgaactcaaatgattggaaatagtttgagagccacaaaagtgataaataggtcccactttgttaacccagacacactgctttcactggagtggataaacgacatatggaaataaagaaagataggctatttttcctgtattagttctgaactaaaatagtaatactgactatagcatttcttttctcacttgagcatcatattcattcaatctgttttctaccaccttgtttcagcattctatgaaatcgtttgctaaaagtgtttactgaccacctgtatagggcaacctttctcttacacatgtgaaaaagttgttgaagtgatcaagtttcttaagcataaaagattggagctagtacatatggactttttgtagattgttgacattaccaatctaaacactgtgacgtttatcacctttgaagtaaaaagtcagattcactatgttactatgtcatctctatttcccataaaggaagtagcctttctgttgaccttaaatttttactctcatgccaataccttttaggtgtgttattaatttgaaagtactggacaatttttcagccaacacattaattactaaaaattgtacagtttatataatccagatatttttcatgccagtctaactgaaagaagattcagaaatatgacctatgttacatttgtctttccttcaaactatcttctccagactcctcaaataacaatacaagtaacattgtgaaactgtcctatccaatcactgaagacttaagtagagtataggaaaaatttatatcccagttacttctctttgtattcctttctatgttactgtaggtgtctattctctagtgccctttccgaaggccatgatgctggaacatgacagcattcttcttttatctctctctctctctctcttgtgccgtatcatagagtctctgaaccataagcaccgagagctatttactgaatcaatctagtcattctagagtttaaattctcacactttgcactttgaggatgcctgtatgtactttgataggaaagcataagtatgggttttaatattgttcatttctgtagaaaactcagtttcatgttatctgtgggtctatttaacataaattatttaaaattaatttttgatagcttaccaagtaatgggtttcattctgacatttctatacatgcatgtcattataaattttgtataacttttctaagagttacttattttctgaatgagaagaaggctaatagtgattatctaatttgaaggatcatttttaattctatataatagacccaaactttcttctgtgccttaatatttttggcaagatacgtataatttcttagcaaatgtgtgaatgagtatgctttggtgggcacgcatgtgtttgcaaccattgtttgggtcctagggaacagcgtgtgtgtgtgtgtgtgtgtgtgtgtgtgtgtgtgtgtgtgtgtgtgtgtgttagtcaatgctaatctcttattattcattctttgtaccatgatgccatgagagatgttggcaacaagtttgttttctttggtcacagtttgttttgcttctgagagatgttgtctttctaagacgaaattaagtacaaatacctttgacttcctttaaccaatatcacattttcaaaccttgcagtagtaacttgtaatgtcatatattgcctaaaattcaaggataatgcaagtgttatagataaatatcttaacttctgatttcacttccctaaactgaagttaagaagttgaattcagttagtacatattggtttagtgcctaccatagaatgttcagtgaaaaaaacaagtttataaatgtcattacagtcttgcatttgatggtttctgtagatttccaaagatactcactttaatacatgataatatttaatatataaattttactattactgaaataagttagagactgggattgctaatgagatcagaaagtggatattcattttcaataaaatgatgcttaaaacgtatttttgaagaatgggatataaaatgttaggggaaatgctcaatttgtctgaaatttatgaatctaacaaatggaattatgtaggtaaatgatatctgttgagaaattgtcactgggttaaacagtgtagcaacagtaaaactttccttagatattgtgaactgatccatttgatattttaaagcatgtatgtgaagcaccataaacctcttatgtagtctgtcaaaaaacagaaataaattcaaatgctccgataaactgaagtagctaactaatatgtcagagaaactctttttttcagaccagatagattttctttaaccatatgaaaaagatattgtaaagaaaattaatgatccttagactttataagagaacttaaggtctgaccctgcattgtgtcactgtgattgcctcgggtcatggagtgtctgccttctttctgtgagatagtcacagtcgtctcttcagaactaagctttgccatatatgatttcaagaaatggtaggcataatagaaatttggaaatatagcattggtctatggaacatactttatgggtcacttctttctgaattccagttgttttttcatctaagcaatgggcataccatgaaattgaaaattctagtaaattgactattctccttaataatttatttattcctcttcaaaaaatggtcttagatagcaaacaacaacaaaagtaaacaaaaacaaaacaaaataaaatgcacaaaaagtggtttcactaaaagaatagaatttttttttccttttagaagggagaaagaacaagaatagtattttttattaaatattttccatcattaactttggacagatttcacatgatgcttgattgtatcaacttctagcaaaacttacactacataccatattctcttttgtatacctattgttcataatatcctctatatttgtctaggtatattcttattagggttaaaatattgtattttttctaaagtgtatcaaatgtcttagaatcacctgaaatgtaactgatgtgtcaatataaaaatatctcagatactacagattttgaaggttcacatgcaacaccgttaatataaaatattttaacacagagaaggaattgccatgtagccatgatgaaactctagacttgccaaactcattctaactttagggtttttgattatcatctgcaagtccccacccattttcttcatcctctggttcctattaatgtcacagtggagctgttgcaattttctttcttctctctgacccctcttcccaggccaggtttagaattaagtatggagtatttcatgatttacggaacatttcaataaataccatgccatttgatccactctctcctcatcccctcactttctcactcagaaaatgtttgtgttgcaccactctataccaggaactgacacagaagtgcaggttgttcacagtacaagaagtgtttgttctctggtcgcccatggttgagtagagagatcaggttggctaattcttgtggtctgttgaaaacttgggattagcacaggggatctatagagaagatgagcagggtgagaattaaaaaaacaaaaacaaaaagggatgggaaagagcaagaaagggtaaatgctttgctggagtttgaagataggtaggggtgggaagatgtggtaagaggtgcagagagggaaagggcttccacgattgcagaaaaaaagaaaacgttttctttatcagtttatatgccaaattattagatggtatgcatagcaatgagcaggaatcagctcattataaggttgctttttacattgtgtgtgtgtgtgtgtgtgtgtgtgtgtgtgtgtgtgtgtgtgtgtgtgtgtgtgtgtgtctgtgtgtggggtttgcctccatatggggtatgagtacgcccatgccagggcagatctacaggggtcaaagaaagatgtataggcattgcttctcttcttccactatgtgcatcagggttcctgtcaggagctttggagccacctaccaagcccacctcatcttttcatgtagatatttttcaagagacagtgagttttagtatcagacaagttaaccttccttattcaaagtgatatttgcttattatttcctaaaaagagcagtatttatatcttttacaagttaacaataaaatggaactttggtgtgtctgtgagattttgttcttaattttagagataaaacaaaaaatgagggccagtggaggcactaaacgatattgctggaatattgaggcagagaatcacacacagcagaaggtaactaaagtgcttcagatatcttgtcagggtgtaagaggcatctgaagcttcgagacaggtttcagtgaggtgtgaggagggaagaacctgctggataggtgagagaacatgcaaagcatttgtccagaagagaaaaaaaaaggaataaaaagcattggggagaggacttaacaaatattactgacaagtggcaaggtaaaagcaacaggatttatttgacaggtaaaagagatgctaaggtctcaatgtggaatagcagcatttggatacattctactcagaaatgatatgatacgtgataagatgttctcaaagaggtaaaaggtagctctagaaagcagctccctatatttcatcaataatgaaatgcaagcaaaatataaaatatgaaaatatgaaatgaagcccaaatatgaaagctcataggagtttcaaaatcagttatttgttgatttattcctcatcatagtgtcactcaaactctaaacacagatctaatatttaaaaatcaaaatcattatcaaaaatattttagtgaaacaattgcctttagatccctaaagttcaaatatcacactttttacattttcttagaatatgccttatattcaggaaacatgttacatcctggattatattaaaattattgtaattagatgtttgtggtgatgaatctcacttctgtcatcggaccttttaaaagacctgaaaatccaacgtttatcttgaacttacaaataacagtaaaaagtgacctcacattgttgctgctggtcctgattgtgaaatattttactgcagactacttcccttatagattctgcctagtgaaatatttctgctaaaatttggagtgtaatagtgactgagaaattcccaggaaggaaggaaatatttggtcaaattactgcttaattattctgatcctgaagtgactggctttgttttgcctcccttactgagtaacttttgaggcaatcaaactgaaaagtcaggaaattaacttttatggaaatcgagtcatgcgttacacgcatttccgatgctgatactgctgatttaggaaccagtaccactgaacctagctgtgctaccaaggattaagactctacagaactcattttatttccttcagtgtcctgagacaagctctaccaatgtgatgactccgctttaattaaatttatcttgaataacaacaagaacaaaaaattaagttgactttgttcgatgtacaacctgttatagttgggttttttccctccctgtcctttgtcaatgtccttcagataaccttaaaattcagactgaagtctgtgaaactgttcaactcagacttcccattttcaactaagaggatattacaaataaatagacgtgcctggtggtaggatgtgcatcttgttagactgcacattttgtacgcacctctctctctctctctctctctatctatctatctatctatctatctatctatctatctatctatatatatatatatatatgtttttggagatagaactttgaagacaatgaaagaccatttgaatttgaattttattcacaaatttggaaatgaagcttaccaatttctttgcttttaaaattcctctccaggctcacatttacctatttcctcatcacactgactgttgtcagttatcagtctgctttcttccaagagtctgttaaatgtagcatgtttacagtatactcaactctctgttcggctaactgtgatagtgcaggcccctcattgccccagccctgtacaattctggaaatgcttggaggtgaatcagtctttctaactgatacatcgtcagtttctttctgtttctctgttcatgcatgcacaggtatatacgggtcgttcatgtgcatttagagttcagatgtcaacctcactgttctttgtaagatatcattcaccttgttttaaagatagggtgcctgactgctctggagtttgccgaagggatgaagctagctggccagcaggtccctgggatctgcctacttacctctcatatcacaagtgtaggctgtgctgctaggctgtctttcacgtggcttcctgggatcaaatgtagaaccttgttcttgcacagggagactttaccacctgttctatgtcctagccccactataccagtttcacagagtgttgcactgagccaattttttccctgattgacttatgatctactaaagaaaagtgggacttttaaagcaaatatcatgtctttcaagaccattataggatgtatgcctagaaagactgttgctacccagtacaaaaagtagtagcatagcttagaagttatattaatctacaaataagttaaaacttccttaaccttttttttttttttgagacagggtttctcttcatagccctggctgttctagaactcactctgtagaccaggctggcctcgaactcagaagtccacctgcttttgcctcccaagtgctgggattaaaggcatgtgctaccactgcctggccctttcttaacttcttaaattgagtttttacacctctcagtttggacaactatgctgttctagacagtttttaatcaacagagcaagctataccatataaagcttctaacatataaaaggtacttgagagatatttatttttttgacctttacattctgcgttataggaggatggtagaacatcattgcttctgttcacacacctacagagttttatctaagtctccataacaagggagtcatagccatacaaagagcatttgacattacattgtgctccttactatgctgatgatagtaaccattcatgctttgaaattgatataggacagcatttatgtgctatgtagaacatgggagtgatatggacattagagataccaccgaggcaagcacttgcttgatttcacacctgctttcagaatggcacgctggtgctccatctgatgtatagatagatggcataagggagcctccatgtactgccctgaagctgagggcaccaccgataaatctgaactccagaaaatgcgattccactccaggcacgtgtaaacccaggagggacacatcattgactatcattttggaaatcagttaattgaaaacatttgtttgacattagagcacagcactagtttgttttagtcaccattgttcttttgggtggctttaggggagcaaacagtaaaacaaactgacttttgtactatttacaggaaataaaattacagccttaaagataaatgagcaagtttgtgaactaactcctaacaacaacctttatgaagattatttgtatgccattaccattggtttcttccaaagatatattctcaatgataataaagtaataaaagattgttttcacagctgtttgtctttgattacatatttctttgaagtactgtaataagacagactttgaacctggaaagagatcaaataatgaattgttctgctttgtgaagcttaggaaaggattttattgtcgaaacatatagagcaacatattttttcttcttacagttaaataatggttgaaagttctgtgagatcattacagatggactggattagagggcttgaggccaagtgtgagagatcagtgccaaaaaaaaaaaagagagagagagagagagagaaagataaaaaaagacagaaagaaggaaaggaagaaagaagtgcttcagtttaaaatgtcaggttttatatttatcaaatatctcatttttggttatctttaagttgctgttgaatattatggaaatgttagtatatagagacatgtattttctcaattataatactcatatctaaaagaatacacaatttaagttcctgtatcccaagagacttcttttaaatatgtcatcattctcaggtttaggtagattagattaaagagtttctctccatcgaagcagatgttaacagtttcttaaaatgtaacaaatagcacatggtctttgttttccctaaaataacaatttagaaaacacaacagggttggactgaagcattcttagtaagttttcaagatgttctacctgctaatacattacttaacccttatcatttccagtcacactttctccaagaattatttattacctggtcatctgcagaacccaatagacattctaaaattaataaaattgggcataaagcctgcagaacttcagttcagctcagtctaaggtacttatcctttctgcatggtcatgtgcatcaaataaccaggcagctatttcaatataatgttttaatttaaagttacactgaaacaacagactaattttgtaaatacgtagcggttcacgatcatatgatttagagagaatgagttgtgtttctgtgcttcagatcttgtttcctgagcctcttacttttcaaactagttttaattgtatttagaagaaaatggttttttcccctttatttaagatataaacctttcaaatgataattttcatggagatgctagacaaaggaatgttgtaactttagagatttttatgatgaaggtgtgtttaagagatgtcactttgatatttttacattatgtcctacatttgtcagctaaaaccaggatattgcctcaatgagaaaaagcatgttctgcacttgtcaaaaggcagtaagtaatgattaaaatagcagtgtgaaacgctaggagattaaagtgatgctaatgataagtgagggaagaaaagggcaagctatattttaatccctgagagaatggttaatgacttctattgcctgagattaaactaaacctgtctcatcagctttttctgcctggtgaaaaaaaaaaaaaaaagctctctgcactttaatttattaaagtcttttaaggaagcacattggtctacagaggttaaacttttaaaaattgtgcaaaacacacacaaatgcttcagaagaagtgtgatttttgttgctggtaggcctgctcacactcttacagagaatccattgtctacatgttagaatgcttaatgaaaaaatattaattacttaagtcaaaaggtttcttttttagtttattaaggaaaacatacccaagttactgcaaggactggttggtggtatattggggaggatattaatcgactgaaggtattattaaatggtaatactcattttttagaataacccataaattcaaagataggatattatttagtaaaatcccttaaatgtgataattctactctttaagcagttctgcatcttgtaaactttacatatgttattgatattttcagtgttcaatgactgattttcttgggcttccaattcgagccttgtaagtattcttctgcaccgtccttaacggtgaagatgattgtggaactaaaattcaatttcttactttggtttcccttctctataggaagcaactatgtgtgtgcgtgcacgtgcgcgtgcgcgtgtggtgtgtgtgtgtgtgtgtgtggggggggttatagtgctagaaaagcagacaatcatgattttattcaaatccttcctttgctcatgagaaccgtattcaaaatattccacagtttccaacagttttcttaaagtaattattatctatcataaacataatatgctttcatatacttaggcccaaaatccacactgatttactttaacgaatgacagtttacgtccgtgtctggattgtgatacttccttctagagtaccctataaagtgctacaagctctcctctgctttaagagttactgataaatttttaagaaataaatacaagaatgcttaaattggtaaatgtatttgcatttaaatgcccaagtgactattacaagtctggcttgtatttcaacatattgttcagaataaatatttttgcttcttttgataatgttctttgtaatccttgatgttcatccttctcattcttatggtttatttttttatactgactaaacaaagaactaagataaagattatttctaaagtctcactatccaaaatattttaagctttatattctaccttcctttttagttgagcaagtttaaactcagtccattctttgatgttaatgaaacagcaatttttctgaaggccatgtagccctaatgagcagcttcttataaaagaacatttaatcaaggtttatttttaacttgtttaaacagatctaatagtttgtgctgatttcatttcagtataataattgctagcaatcctattagtaagtcctagtacacggaagttaacacaaattccattctaatgagaatagggttatagcaaaaataatgttctcacacaaaaaaaaatccatatgatactggtactctctatgctgtaaacggctgcatcctgagtcactagtacatgaaatttggtagtcttatttaacatgaacttatattatctctgagataaaagttaatgataatattgattgggggacattttaaaagataaatcacatttatcacttaaccacattttggaatagttttctcataataatgccccttacgtaattgagctgaattctgtacctaggtacatagagaagtcactgaggtcttgctatatagctgagtggtaaaatacatgcttttgaagctcaagtttcctgggtcccatctccagcatcatttctcataacattgcttcatcctcgagcacctctttcctttactgcagccttgacaggaagaaaactgcaccatgttaggacagactatataggccagtgtatatatagacacacacacacgcacacacgagaacactttttaaaagaaatggtagagccttcagctggcaaatggtggacatttcattagtttactgttagaatggacttcaaagagcactgtggtttgttaagctgttcaccaacctgaagatgggaagttcattgtgacaagggagtaagaaaggaaaggctcagagcaagacgttcttctactgaaaacataaagtggccaggatttcaggcccagcaatgcaaatgcatttcgctaggttcaggttacagtcttttaaactttttattgcttaatatgacacagtgacatttaaaatatggagaaatggaagataaataatacggactgaatgacattgatttaaaattttaaagctgtgttaaaagtattctaacacactgaaggacatttgtaagttgtacattgtttatagatttctgattagaactccaaagcataatgtattatagcttgccatttcctgtagaggaaaaagaatattgtctgcagaaaagaatggatagtaaaaatttaggctcctaattttctttcttttaagtcattcgcttttttgttaaaggcctttatgcataggcctcttacaagttccaatcagtatcttatatatttgttctggaatacttccaaagagtcatttcttccgtaaaaatgttaaaattgtaatagcctgtaagaactgtccattttatgcctaaaatacaaagaataagttttcacaagagcattcaaaccaagttattttgataattcaaacgtatcttttattgcatttattaacaaaaccaaaaactgtatgccaatatctcctgtttttcagaaaaaaaataatgactctcaccaaatgtacactattatccattgaagagcctggcagtaatcaacactgtacttctttggtctaattttagaagtactgagtgtcacacttgacggagcctgaaagcaaggatctttaaatatgttccacaggtgttttgattccacaaagattcaagaaccactattttccgaagcacaactgtgtgtgctaagtggaaaagaatcacttctaccaattgtgtctactgaaatgaagttcaggttaaatattttgtttagagtgtatcagctgtagaaggccttgtgaagatatttggagctataggggtgatgttaaatgcacatgtcaaagttgctgccccctttcacggactccggatttcttgtctatcttagccttaaacaatcccgcagggttttactgattgcttttcacatttccttgtgaatgctaagttgaaatgcattaatccaaccaaaataactgaagcgcgtcttcatagaaacaaattaactcgtgttcctaggtcaagataaagtatcctactgcagaagggtaagcaaaagctttacagtagcaagattaaatggttcccctcacactcagaaaagttcaataaaaaggggaggcttcaaataacacatcagtccattcttccaagttccataaattaaatgttaaaaactctctcaatagagtccacactttcctgagttgtttgaacgatttaaaagaaatttggtccacaatagaagtaatatcatacaaaccaaagaatgatcaggaaaggattatggattacagtctattctatattttgttctagctgctttattttcttctgagagagagcctgtccatattcaattagaaaagaaaaaaatgacacctgtatagttggcttactgaatgcagggagcacaaaaattttataagaaaataaactatataagcatcttatttcttgaaggaaaaaacaatgtagtttatatttttccaatcacatttatcgactattttcttttcatcttagaaaaatctatgttacaatgatgaatagcttattcatgatattgaagtatatcacaactttttccacttacatgggggctctcctcggctggacattaagggactagccttcctctcctttctcctctaaagtttccatcccctcaattcctctcctctttcaatgcagggcctgctcaacatatgcaaacaatctgatcacttactaaactacattccggctcctggacctttttatttacatttgtactctttcagacagaaaggaagaaaactaagtgagttataagttattttgtttagatgatggcaagtattatttcaagaagagcgacaatgaataatatgtagctcctggttaaaaatatttaaatgggttgagcatcaatgatgaaattatcagggttttagaggcagtcatgatgcttacacttttggaattactgtattgagaaaataacattctgaaatgctgattatgatagacataataagaccaatagcagtaataacaggagtatacagaattaaatatataaaagtttaagtggttaaaaatgctaaattttgcctgtggggctaaatcatatttattgcaaagtgctgtttaaatccttcttatgttatcttttaaaatgccatattctttctatcccactgaaagttatacagaagaaaaagtgttaaagggctaggaaaatattatttcatcattcttgttccattagaattcacttgggtggctgagaaaatggtttatggattagagagagaacaagctaaaacatttcataccttcatctctgataaattccccaaactcattctttgcatctgagccataaataacaaccatgctttttgctaaaaagagctttttcctccaccaggtcttttgtcttggagatgaatgctataataaatttgaagtcttagggggggcattgtttgaactataacattatggtttacaactgttgcttctattatgaggaggataaaaagccactcggaagcttgatctctgtcacagaaagggattaatatttcagtcttcaatgtgggtcaagtgtatgattctccccaaagcaattcactatgattaatttttattatgtgagcattcagattctccttatattcttatgtgtttcattcccctactgactcactcctcacaataccagaacttagattcttcacataatagtgaaaatgtagatatttgaaatcttaaaattttaatgaaacgtcatagaatttttttctgaaaaaattttctcaataattatgtggataacacaccacattaggtgagtaaatcacttttaatagtagcattttccaataagtagtattaaatattatactttaattgctaagtaatatgatattttaatttaccactgataaactaattaaccattgagaaatagagtctctcactgtgtgaaaatgggagttgtttacaagtatagttttatctgaaggcaggagataacaacaactgctctgcctccctccttcctcagccctgaaactttgtatgactaacagtttttatatatcacttagcacttctctgtagtctaagaaacattagaaactgcaaatgtaaaattttaacaaatggcctaactaacaatttctgcaaaatacttgtcagcataatcaacaattttattcattatggttttttttttttacatattgttgttgggatgctagacacacatcagttactaagctaagaaaaccgtgcttgccacatgcaagggactcacacacccaggacagacaattatataggataataataatctttggaggtagggaaaatgaaaggcacatgccatttactgctactatataaaatctaattttgttgtgcattttcccaaatttagcaacagtttagaaagaattgaacttgaaaaaataccactgcctaagtcctgccacagatgaactaagcagcaagttaaagtggtaaatgatgttggcttgtttggacttttaaaacttcctcaagtgattaaagattgtaatgttcttctaggttgccatgagtcaacctagaatagtggttagagcctaagaggctagatgggagaaaattaaaaaaaaatgtgtattggtgaatttgggagggagcagggcatggttgggaccaaaagcttttacattatttatgaagaccctgtgttggaatccgaatttgatgtgatagtcttgtagaactttgttgtagaaactgaacgtctacaagccacatcctttgatggctaagaggtatagatataaagcacgtctaaaacacctgacataaataatgacaatcaccattgctgcttatacatgactggagacagggtctgggaagccagcttaataaagaagagcatttgcagtgtcagtccaaagacctcagcttgagctcacagtacccacatagaagtcaggcatggatgcctctatatgcctgttaaacaccatttgtgagggacagagacagatagcgtctacaaattccgaggtatccagtctagccaaaatgatgaacatcatgttcagtgagagaccttgtatcaagagaatacaatgtagagtaacagaaaaacaggcaacgcaatttagtttctgtgtgggcacactcacacctgtacactcacatacattgtacacacacacatgtaaacttacacacagttacacaaacacacatgcatatacatgccacacacacatacacacacacacataacccacaaagatggctgaggggatgggttgtcattagaccacatacgctatcaccttaagtttagattttatttggaaacaatgaagacacagtgaagatttggaaagcagcacattatgtgaggttgagcaacacaaaagtctaggaggagtagaggtgagaaggctgttctaacgttcacatagaagggggctgggctgggactgagatcacagtagaaggagtgtggagacagatgtaacaatctcttcagggctggcacattgaaattgaccgaccacagcttggaagaaatgaagtcctagatcttatgagtatgtaataccaagccaatatcataaatgctatatctagaataacagtaattaacatgaaatgtctctaaaaggagatgattattaaggtgattattgataattctcattaggttattacttaaatcatcaatatttgattatctaaattttagtattttctccgcagccacttttctctatatcagtgaccagagaggatgtatactaactcggtattcaacctatcagtgttaaagccttggctggcctagctgaatgaatgaaatcatctgtaatagttggaagtttacatttgctactatgtgtaaattcatttgataatattttttctactgagcctatgactttattaaggatatcttgacccttgtattttagaaatcatctcaaatgtttactagttagaagtgtaacaattccattgttctccaaaagaggagactccgtcagaacaacacggatattctaaattacagtagcctgtttacattcgagaaaaggagatcttagaaacaactgtaacactgtactttccaagtaagcatgggaagtagttagtgcacacagactctgcaactctgctgcctgtatttagaacataactctgatacctctggatttgctcctaactgctctgcagctgtcatatcatcttgaaaatgagttcaatactgcaatattcattcagtgaacacaggtaattattaaatgggttaatatatggaagatgcttcagatacaaaatgaatacagtagtgtaagggctagtgattctgatgacagactcttcgagcctaaagaatcagcacacatcagaatagcttacccaaggcaccatgcccacttatggcaaggattaaacccatcttttcacatctgtgctaggactgcagccttttacacatactgatgaactacagatttttttctttaattttctcatctttttacatatactccagtaattggaaaaaaaacatatgttattcgtttggccaaataataatactaccaaatttgaaaattgtgaaaattaaatctttaagttttcatctttaggtgaatttttcttaatcgtgaattgggcagatgttttaaatactgttggtcctttcttcgcagtaccttcacagtcttggatttcttcttgctttatctcatttctgcagttgttcacttggcaggtaggtctaaatctaggcaggtaggcactttctttgtgttttcccacatgaacgcagaggcctagaaagggctcaggacgttgttagggccccagacagagagttttgtctagaagtgttggtagattctgatctggtgaggtttgctttacttgggggaagttagctcctttgcactggtgagctgagtatagatttctatacagtatttgatacaccttccagccttgctattagaccagaaagtttaccttatgaatctgagttttctggtctgtatcagttacataataaattaagtcttacaggcctttaaggacattgagtatcagtgagttaataattgcatatgaaacagacatcagtagtaaaagctttcttatttacaccatctatatttacaattatatacttaattgagggatacacatacacatataaattttcattttggttttatttctccttaagttaacaaatgttaaaacttttacctgtggctttatcctgataatgttcttggatcacctctcccactttgactccatgtatcataaatactttgtaagcttttggctgctagctccttgaaagatgccctagggtgtgcggttgcattataagtgcctttagtacagaggaacaaatgtggctcccttttggaactatagaggagtcatgggtatgttagaagcctcccgcccactccacccagtgtttgatgtttggaatggttgaggttcaggtactattttaaaggaaaaaatacttgaaaatctcagaggtaataaaagaatgcatatatttcccactagaggacactttgtctaacttcgcaagaaacagtaattaattacaggataggtcagtagacccttctgtaattgagataaaatgaggagggtttgtagtctcagttaactacaaagatctgtgccttatcacaaaacaggatacacttccaataagctttttcaagtacaggggaaatggccctattagacacatggtgctgtcctatggagtaaattacaaaagcgccaacatataatacctatcaccagaatatctaacatgaaggataaaataataatttgagaaaaatcattcctcaaaggagcaaagattaggattaaaggaaagttggaatcgcagagaggtaattcaacatttgattaagagcttaatttacttatctttattcaactcgggcttcttataaaattattaaggtttggtgaatcgagagttatttttagatattcttgcctcagagtacaggaaaaaaggattaaaaaccctacaagatcttcgacttgatatcactggcgtgaggacagtccttcatgaggatgagcatgctggattgtctaaacttcttcagtccgaagcaccgcgtccccattctctgatgtttatgaacagagctgagagttggtgtgtcaggtgtgctctgcgtggatgcacagggtgattaagacaatgaactcagagaagagactcgagtgaaaagccaagagaaataaaggaagagggaggcaaaagactaacagaacgctcataattgaatcgcatgtgcaaagataaattagtgagtggcactgggagggggaaccttggaactacaacaccctttagttcataaatatgccagtattcatttttttttcattgttagcagtcagggctgtgtcctttcctttgatgatggtaacgagttctatgacattgccactttgagttcttgcttcattagattgggtgactgtttatttgaaattgtaatgaaatatttactttatagagctataaggattaagtgtgataattgagggaggctgatctggagcgctcagtgtaataggtcccccttgtttgaatacagagtgcggtgagaatgaacgagcgagtgagtgtgtttctgcctgtcactttctctctacatgttgctttttcttctggagataagtgggcctaatgctgaacaaatactggaaatcagaagccactgagaatcattcgcctctcgctttcccatggcagcgtgatagacgctcaatcaaagaaccccctcctctcggcaaagcaacaattttgtcaccacgagcaaatccaattgaaaagtcccttggactgagaggagaactccagttgtcagaatcagcaaacagaatgaaaagaactaagaagagtaaattggcacctggggcctccgtggtagcctgtgataggctgtggcattgtgttgggcagacattcagccattttcagatataatgggagaaattaatgcaaatgagtcaatggaatgaaatgcattttaatgcagattcgaaggactatcccgaactgcttgataacaagtcgctctaagaaaaggcttacattgtgaagactcattttttccccatttcttctcactagtgcctcataagggttctttgttctctaagtaaactctttctaaactattgacattgctcatttatgtgaatttcagatttttcccccctcctctgacaaagtagccttgggtgatctgggaaaacgttaattgcaagaggacaaggaaactggctgaaacaagaaatgcagtcattaagtgcagtgttgcagttgtccctgcctcattattgcatgcatacaaggcaataaaatgcatgtttcacaaacaaatcttttgacaactgcagttcaagagcctccagctgtcctgtttccttgcatctatttctgttgctttagtaatcattacaggagctaagcttccactcacagagccttttatggcacacaggaatcacagtcatttttacagagttaaaagggggggggggggagtttgctttcgagcatttaaacacatctgcttttcagggttaacttgaatttctagcaagtgttttgttttgggtgttgagtattgataatgatattgaataatatcaaaggtgatggggaggtgtgaattcagtctcaacagagatagtctttcataaaccaacagagttatcctcttttaaaccatctctccaaaaagaacaaaaataagcaataatttaagaaatagggcttcatctttcactttgaatctgtgatgttttcactgataaatgcaaaccatttctttctgttttattttctttcttttttttttgtaggagaaaaaaatagttaatcagatgaaaaagtcattaagtataagtgcatttggaaatggggaactgtcagatacacaagtaaagcagccaggcgggtgggggctgggaagggggggatggtggaggtaacagattcagcattgtccaaaagttccagaccagtgattaatgtgtaagataatggacttgggaaatgagtaaacactccccatgctcccagctttgtgcctgaacgacttgatgacaagggcagtgcaaggtgagaatttaaacaggaccgcaggaaaaaaagacacagccaagcaggaacacagtgtgaggagggggcctctcctccctgtgcagtggaggccgcacacaataccttccctcaaagcaggccctaacagtgcactaatttagagtccaacatgggaacagaattagaggtagaaattatatgtcactcagacatcttgcaatattgcagatatttgtagtcctccctgttcatttctttcctaatgtcaagggccccgaaagaactggggtgccagactggcactcaggtgcatcatggaaagtgagagatgagtttgtatttagatgaaatttgcatgccaaggtatgtccagttgttgtaggttattgcttgagtaattttactgacacatttagggaaatttctccacacataggtttcagggtctgaaagccagtcttctgatgccacagtatttgttatcacgcccttatcatttgaacttaaccgtcctgaaggtactgggagccattgctacatatggaacttatatttccactgcatagaaattgctatacttctttgccaactcctgctcccatgtttcttggggttgtatcagagatgtttttacttttctctgtgctaatgttagcttaacttattaatgctgttggttctctccttctgccagtctgtttgaaatgaacccatcaaacccatcctacaatgagtgttttcaactctctaaagagcagcagctggccaattctctggactaatgtcatccagtattttaaacagtgtttgaccaaacaatgtttgaccatgaggagacacgctcaaacctctgatctggtcccaaggcatctctttaatgattaacttaaatttttcctaaatggtcatatggcttatggactctatgtacaatatagagcttctgtgaagcgtgacgtttatctttaagtttctgtgtattccgcagtcccgatttagaaaaccccacattggatcttcttaaattcaggttggcaaagccattcatgaaaagcacaattctcttgtgacatgctacggtccaagtaccttttaacaatcttttcagcttctccacaagaggcttgtggcattcaccttattacaaacccatttcagtgattagaaaaaaatggtccctagcgagggggatttacttggactggacggtgagaacactgcggagccagggctgagccactggtctatttattttactacatcctcaaagaaaatgctttaaaagtggaaatcatttccttatattactcttgatctagtgcttatggcatttagggcattaaacattttttttcctaattttgcttctgatcttgaattttgaattgctatgtattgatttaagtgatatttcaacatttaattaaatgcatgtttattatgagttactgaggcatagtattaattattcaagctaaataaactagttttgctttatgtcaataacaagccctttcaaagatcttcaaacgtgttttttactgaaactttcaatacatatttctcatgttttatgcattggattttacttaacaagtaatcaaacaatggcagtatatgaaggttttttgttgtttttgttgttgttattgttacaaatttgttatgtgagccatagtttttcctgatcctttaaattcactgggccactttcaaaagtgaaaggtaggcatgaggccacaactcaggatatctgtgattatcaataattcatcctttcagagttgaaaaaaaacttccttttatttaagatttatctacttatgtataggactacactgttgctgtctttaggcacaccagaagaaggtatcagaccctattacagatggttgtgagccaccatgtagttgctgggaactgaactcagaacctccggaagaatagtcaatgctcttaactgctgagccatctctccagcctccaaaaactttctaaacatttcctgaaagcattgattttctgtaccttagaaaactgatcaaaattttagatccttgtattagatacactatgcttttcagaatcataatatatttatatgttaaaattattgttttgcattaaagtgattttatttcatatcagtctctataattagactgtgaattcatgtggttaaagggattgagttctatattgatccttattcctaagattattaatatgatgtctaagatactattgccattcaaaactgtttaaagggctggaaaggtgactccatggttaagaacataaaatttaaaaagttaaatattatattttttattgtcttaaaatcaactcctcagccatcacctaagtcctctgagaagtaaaaattctaaaatgaagacaagaaggagaaataagaagcaatctcagatacgagatataaagaattaaaaatgaaatctctgcaaagggggtccaaattcagttaagcatcttaagtttagccattttagtagtttttcaaatttacatattttaacatattttatatcatagcttcagtatctagtacttttataactttgccccataatgtctcagccagcaaattggtcgtctgcagtgaatattatattttattgatttcttgtgttgtgatacttttaatagtaagtggttgaatatagttgtttccaaagctatgattaaaataaatgcttgttatacttataaaacaaggaagattggctacagaatagatccaatttgtcttaaagatactgtatataagtcagactttagtgttgtacaataagttgtagaaagttattaatctatgcattccaagcagtgtacaattgcttattagtcccagaactactctctgactcttctcggtaccctttttaaaatacacagtccttacttagagagcctcacaatattcttccactaactgagccttggacaagctcacacattgtaggaccttagtatctactaaagatactaaggctgaatgtctttctgcagagagagaactaaaattatggtttggtaattctacaaatgtggtgattaaaccttgatgaagacggtttctataaaaacagctcagccttctcagacctcttctcatctgctctctattgaaggatctaagttcatagcaactttcatgtcaaagctacctgttttgtctatttatgtatcgaaatattgaagtcaaatcaaatagtagttgtattgttatcccacatcctattaaaaatgtcttcaaacacaagacaaaacaaatagagcagaagacaagactccaaaggtaaaggaactttctcccaagtcagatgatatgcgttcagtcccaggaaattataggatagaaagagaaaaccagcctcaattacatgtcatttgatctccatatgggggccaaggtatgcatgcatacatgtatacacacacacacacacacacacacactcacacacataaatccaccattcaacaaccaaacaaatttacatatatttgtattgtataatttttataaaattatatgatagatgtgatagatagatgtttaaaaaaattaaaaaaaacttctaaagcttgagtgttactagtaaatcttgaaaataattagccaggtggtgcttctaagaagtatcttagtgtgcactgtttccctacagataatgaaacaatgcttatagaaaaaaattaaacatttttctcattagtgtttacagggaagtgtaggagtttcaatattttatgacaagctttttatcaggcttttgacctttattatataaagataactgatattaaatatgatatcagtgtcaagcatcatggttcacatggcttttaggaggctgagacaggaacattcaaaattccctaggctgccctgggctacacagagagagcctgtctaagccaaaccaaaacacaatgaccaatatagacaaacgaagagaagagttaatgactgacagctagtttcagcatctcagcttcttgtactgttttgtttaccaccctcctgaaatacattaacttaacagacaatggcgttcttcagatttcagtgttgcagtgagttataaatgtgtgccttgtttttccagtcatgtctacaagatatgatttggcctatatttgtttctaattgtttgagaatttcatgaaatactttaggaaatgtgagacaccctagggtattgcgaaatctgggctggaaatcactggcccagagaagggttgctaaattctgacagctgttgggtcagtggactaagccatttaacctcaataaacctcattttcctcatctgtaaaacaaatctcctaatgttgacctaattcatagctcaggttggcagcagctaggaaaatattaggagtgaacatcctccactaaagaattaactcccgtgtctctcaagaatttcacataccactgagcagacagttcactgcatggcataagaagggggaagttaggtacattattggtaggtggacaagagccagaacaccagtctcaaacttttagggtattatttggtcgtccccacatcaggaatcatgggtagtgttagaagggaaatgtatatgagtagaaaaggaagctctggtcagagttagaagtgaattcttgtattctaaagtgttgtttgatcagttttgaactgtttcaggaagtattttgctaagggtgtatatgaaagaaagaaataaaataaagaaaatttgcaaaaatacttgaacagaaaatgaaaaggtatattgaggcacacaatcatcaggcaaaacaaatccaaacttgttggcttctgggttataacaatggtattgcctgtagccggaatcaattaggatattttgaaacaatgaggcatttaatcatttatatattaactatgacatgaagattactttatattccttttgagtgattggtacacatagaaactgatatttcttgtatagatggttagagctcttggcagctgttgaaatagctgaccacagtgactttagttttttcttttttttttttttaaggaaacatgaaacaatcaaaaagaggataaaccattgctgataattgagaattgattatatttcaaactctcaaaatgcggatggctcctgagcttcctcacagttgttaggagaggtagactgctggctgtaaaatattgaatacaatttccttcatgctgttgccagaaggaagtcaggaatctttgcatttttctataatttagcactttgaacatagcaaaattacaattcatttgtctacaaaaaatcatagttaataaaaagcacattaacgttttgcattctttctcttttaaactaggacatctgaatcagatgttgaaataaagattagcctttttttttttttgcatgggatggcagtgcacgaaccttttaagggatctgtgaattattgccttggttcagcatgagtgcaatgagaagaaatgtacctcatctgtaatacactgtgtagactaatatcagctccttttttttcttatattgcagtgagatattgatctggtaaaatggtaccatattggagctgtctgttgtggtattcatcactctgtcacatccctagtgccttggagttattggaaagtggaattgagagagttctgtcatttgctgtggcaattcattcacaggacagtcactacaatacttgcagtggttcacttatctttctagctgggatagtttcaccttcagtaataagatggcctttccatgcatagtggtataaacaggtgagctttaactctccctgagtttgcctttgccgtctatccttactcttttctagtctctactcacaccttttgacagtcctgaggctgatgttttgagtttattcctgtgagacatatctgagctatggtttcaagcttctttgctttatctgatggtagcaagaaagcagaagatgaacttttatatgtagaaagctttgcattccttcccacgagaacatatcagttagtgttaaaagagctttcaaaagtgtagaagatactgtcaatcctcagtgagtagatgaaatgctttgaatggattatttttgttttgtattcttgctaacaacctgatgattatactggaatgacatgttactttaaaaataatttagaaacaaggatcccatctgacgaagtaagtgttatctctgaagggcatcaatataaagtgtaagaacagtttctcctcgggaatttttccagcaataaaactctcagctctagctaggaaaccaagcagagaatatggacagaagtccacagcttatagtctaacggttttgcaaaagctgagtactgtctaagtagctgaggagtctgatagacactaatgaaaactctgtggctactagaaatcaaggggcttagctttaagttggcaatgggagaaaagtagagatgcaaacatctgtgtatttaccgcatgattttgtgttgctgttaatgcatagaggccagacagagctttcatggcagaataagctgtggttctacacttaggttaagatccatacttttttctttgctgccctgaaaacacacccctcatttgctcttgcttcccagggattaaaaacctcagagatgacattttggtgactaatctgttttcttttttttttttctcagtcagcactggtatttacaacacacttattatgaaggatatgttaaatgaatcacagaaacaagaatgggcatttttcaaagtctcaatgagattactttatgtttgctgatatgtgatcatagaactcacatagaaagatttttaataagtagcaaaacagtaataaatattggcagtgttatctctgtgaaggtttatgtgaaatgttgtttgattgtggcatatctggtttactttgctttattgcctaatgtcaggtgaaataaattgtaacatatgagaaactagacactttcatattttcttgacctatatacttggtattgttagagttttgtgttaattcctattttcttgtcttcgtattcgtcttgtagctgctaaatatatttgaaaacacatttttcccaggtaattttcacatactatatcttatacccacccccaaaaaaagaaaaagaaaaagaaaaagaaaaagaaaaagaaaaggaaaaagaaaggtttaaactcagtaaatgaatagacacttaaccatttggtcaagattataaggtatatttacaaaataatttctatatcatattgaaagatttagagcaacaagatcttcaaatattagaaagggcagggtagtagtcttagtatggccattactgagctgttggtattcgctagaatgaacagaaatagaacatcactgtattctgtacacagtttcaatctgaactatgtacatgctaaaaatcttggcttctccatgcatttaggtgctgtcatggtggttgttgccaaagaagaatgcagtgtgatgttattatagtaaacagcacttaagcacagctggcagaattgatcagggccacattagagtgaacttcaacagatgactgacgcagcagaaacaataactgaatatgcaaacagttcctgcagtgaatgctctggggatcaggcaccattatttttgactttgaacagggaaaagggggcagatttgtaacctccttttatacagaaaggttctgggtattatgtaaacatcggactgccatttataatggtggttagctacaatgcaaaaccgaagcctcccctgactatttacattccattaattattaaggaagaaaaacataaacatcagataactgtgtttaatgcttcacttaagaattttttaaagctgtctcttctcaattaatgtttgttatcaagattcggttttaattcggacactgatatgtgtgcttcgttgatggttcccactcttctcacatttaattataatacaagtcaattatatgaattacatactagtgttttctcataataaagaaagcattaaaagtagtgtacaaatattagatagcatttactgaatatatttcttttattgttggtatcaaagtcaatttatatttttctaattatgaaaaatatgaatttaccatacaaattatattgggacaattgatcaatgctttcatgccccattttaccatttaattactgtactaaaaataaagagataacggttaaacttaattaccaaacaattttattctttctttattgtgttttgtgggtgatgctttcttttaaacagtgtttctctgtgtagtcccagctgacctggtactcttctctgtaaacaaggctagcctcagattctgagatctgccttcttcaatctgagttctaagactaaaagcatgcaccaccatgcacagccccatttcatttttataaagtttggctattcaagcatttgaaatgaaatgttcgattttactgctaaaaagtccgtttattgcaatactaacttctcttataactccttgtaagacaattaggcctcttttcatttattcttttacatgtatacacattaattagagaattcaggtatggcatttcagcaaggtaaagctacactttgtcagctgcggtttgggaatacatgagtaatgaaatgcagggtagcagtgtatgaatggacattgtatagcagtgtatgaaagacatgctaactcatggccaggatgcttgcatcattagacgacacatttgttatggaatgggaaccaagtaagaggaagggtgaaggaagagagtataggaaagaatacagtataaaggctgtgtcagaagccagaagctcagtagtcccactccctagcattgttcatagcacagagtgaatctgggtgtagatcctcaaaagcataaatctttgcaacgtggaaaagtggttgtcacaaaactgcagggaaatgaaagctgcttattttatttttccattgtccaatttcataaaccactagccccgtttccttcattactcctcttccaacactcatgcttatttaggtctaactttgctctctcaagatgatttttttttcattttggttcatttgttctttttaatgatggtaatactgtctagggtgttgagttctgaggagggaaggaaatggcatttatgggacttctgtttcttattcaggcttacaaaatggtatactgtctaagagtcttctactcctcactcttatagcaagacactgccccagtgtgtctgctctgaatctgggttattctttagttacacagttctggggaaaaccatgaatgctttcgtcagagcatccatccatataaagtgacttgaaagtatatattgacagagttgacagagtggccatttgttattagataaccaattgtcattagtcgttttaagtgatgagttaaaaaaatgatttattaaggagaacaaatttgaatttgtgaatgttattgagttttcttagcattcttacatcatctataaaaggattaaattattttattcgactccattcttatcagcataggcaggtggagttaggctcatgagttaaacctctgtatctgaacagagaggctggaagaggcccgggaatggaggcactgaatacaagtttctcaagcaggttgctgaggtcccagttaaggatttccttttttttattacgtattttcctcaattacatttccaatgctatcccaaaagccccccgccccactcctctaaccacccattcccattttttggccctggcgttcccctgtactggggcatataaagtttgcctgaccaatgggcctctctttccagtgagattggggcctagcaaacacagaagtggatgctcacagtcagctaatggatggatcacagggcccccaatggaggagctagagaaagtatccaaggagctaaagagatctgcaaccctatcggtggaacaacattatgaactaaccagtaccccagagctcttgactctagctgcatatgtatcaaaagatggcctagtcggccatcagtggaaaggatttcctttttattctcatacatttcacataaagctttcctttgtaccatgacacttattgccatatttcagttactttttgaaatatcatcctagttcttccaaagtatagatgacaatgatatttctagataccatgaaaaagtaggaacctgcaccagaaagccattccatctccttaagaatggatcttctggatagaatttggtgtcactgtggtctcacattagttactggaatgttagaatatatcagtgaggcagaagccacacaatgaaggaggcagcaatatgttcttacactagctgcgtggttggctcttcagtaaggctcatattagattctttcttaatctaaaggttacatttggatcaacatagacatgttgatggaaatctgacatctatagacttttgattcctccacgattagttatcccttagaatgtttatattatgatatgacaatgaatttcctctgtccctattaaacactgaggtcaaatattctgacatgcatactgaagcttgcatacctgggagggcatttcccatagacacttgtttctataacgtatgttctcatagcaatgaaatagcactagaacttggagagcagaaaagaagaaaaaacaaagccggatgagcctcttaacagtgatgaggcttagagtgaaatttatgaaaagcaagttagtgaaaacaatcttatataacacctagtgccatgtcattcataacctaattttagacatgtggcttaatttgatttttacagcaatctttaatgcagatggtgttattgccacttaggatatgagaaagcagattcagacatatgcatttgccaaaggtatttgaacaaacaaagctctaaatttaaatccggtgcctttcccaagaaaggttttgcatacagtttatgtttgattacaagatacaatctaatggggaatcaaagacaaattctggagtttgctcaagccaataaaaaatttagcatgtgatgttacactcatttcgaatggccctggttagcaaaggtccctgttgagatatctaaaacctaattttgttgaccatacagatatctaagtgggaacagaactgggacgcatgtacatatttagtcaaggtaggtgttaattttattatcgaatggtcttagaatattctcacaggttggccccattaattttaagactttctgttttctgcacagaaccggaaggcttatgtccctttcatatttagaagggacacatgaaagctctgtccctgtacaaccttccagatagatggttggccatgaatacagcatgagcctactggatggtctcacagtgaggaacaacatgctgactccttcagattttctcagctctatcttccagaatttaactcagggcattttcatttatttatttatttatttatttatttatttatttatttatttatttataatataaaaacactgaggatgagctaactgcatcagaatatagtgtgacttataagtacattatttgggagactatttttttaaggttctgagattctttgcttctatagttgggtcatatgtctcactgcatatgaaaatatataatgagatagtttatcaaagatgatcttttccaaatcattaaatagctcgttttcattattgcttttcagactatttgaaaggaaatctcctatttcaaaaatataaaattattaagccaaatgtttcttgagaaatgaaattttcaattcatggcaatcaagataatataatttcctcactcccatataacctgtgccctgtgcttctcaggtttggaaatgagaagaaaaatgactgtgctttctctatccaattttctttttgctttctttccaatatttgtggctttttatcacttgataaaatctttatccttctaattgacattcgtttcaattaaagaatgtagaggtcacatgaaaacaaatgtatttgtaaaagaacttaatcatttcattttaagagacttataaggggaacattaaagttgtatcttccctttgttaatgtcattataaaacaacttgtttcaaacactcacttctatttccctaaacaatggtcatgtaaaaacaaataaagtctctgcagagctatctgagaattgcaaatcagttaaggaattaagctggtcatctctttgcattggatagcctacaacttgggttccttcttgaaccatgtcatatatcatcagcctagagtgtatggacaagattttgtggctcttctttttcttttgcttaaggaggggcatacgatagagctgaaaactttaaccatgtgcctgggaaccctttccttattctaataacatctcctcagaccaccagagtgggagctaagtcactgtttctacacacacacacatacacacacccctgtgaggatcaggtgcatgcatcctgttcacagttcttcctttgttacctcctaacatgttcacacatgttttggcctctgtagataatatgctctgagtttcctttagtgtctgtcctcagtatccacatgtcaatgagtttgccagtaattatagcattgagcattctctttcagcttctaccttaggaacttctgtgtcttactctccatataatcataaactcattctcttccactattctgccaaccactgtgtaaatttcagtgcttcagaaatggttatttaatttaaagaattgtctgatctcccagtcactgctttatgactgccatttattacgtagctttagggaaaaatatctgttacaagcttcatgagcctctctagagcagtagctcagacagaggagagagttgggtgtagacttatcattcagagtgtagtatgctcatatcactcttcgtatcaacttatggaaaattctctgaagtgaaaaaaaaagatttaaaagtttttaccatgttaggcaaaactatacaacacgctatttcccctttaataccagatagtcttcttttatgttttgacatttctttcccccagataaattatacattgtacaagttagttaaattagtacagaccacttagtatacctctcaatatgtttcatagagtttggaaaatgatgggaagagtaatatattagaagatttggagaaggagtttggttttgttataactttatttttgtattttttttagtaatgctgttttatacatttagaaaccttaataacaatgaattcacatttccaatttagcatataaaataatctcttgaagacatgtcttcatagacaattagtttagtcaagcagtttgaagatctatcttgttaggttttattttcagtcctcaaattaaaatgtaacagtgactaaaatatataattaaacagtgagacaattttctaaacaaacatctgcattggtcctgttcagcaatactagacacaattttggttgagttctcttcctggaaaacagtgcagataacaagttcttgcatggccattctgtctatgagttcaccttacgtactactatctgatggcatttactcattggtagttttcctatctttttccaatgatcaaagtttaaaagtcaattattgaatttcttccaatagcctagtattctgaaataaaaggccatgccaaatgtgctgtaaggatagtttcaaagaacatatttgaacttggtgggaggaaaatacatgcatagtgttccaattctataaaagaggtgtcacatttaaagaatgattatagagttcagagactgaattatatcatagcaattttttttgcataacagtttgtatcagcttttgttgagaagactaataatactcactgttgctttatctaaaattatgttaccattctggtaatgttggtgctatacagtcattgtcaattatacaacagaaagaactagacacttcaccctgagtggtaggtggatagtttaattttaatataattgtaatgctattgagaactttctaatctaatacttcgaaacactttcaatatgaaaatgacaaccttctgaaatgtatgataatgtcataagaaaatattgtcaataaaagaaatttcagtaacttttcacttcagaatactgtatgagggggtaattatatacacgcgcatacataaggaaacaaccaatacactgctactttacgtagttgtaaagttacctttgccattaactctttgattgttgatcctcagtgtgaattgagttagcatgagcaaaacattcctctgacatgtagtcatttgtgacacaaataaatcataatatcatttaggagttacaaggaaagtagaccaaaatttgttctctacatggttttaaattttaaaacaatatctccattttcaagggcataactttgtatccatatgctatgttccaaattacttttgaaatgtccacaaaatggaagacatactttgaaggaaaaatctgttaactgaaaccttccttgagttaatggttttttgttgttgttgttgttctttctttctctctctctttctttctctctttctttctttctttctttctttctttctttctttctttctttctttctttctttctttctttctttctttctttctttctttctttcttctttctttccttctttttttctgtgaattgtactatggttagctgattaagaaagaagtacattttatttgatgtacctagttagagggggaaacgtgatttaaagaagatctaccagatgtgtgacttggctgtcttcatcagtcttgagaaaacagagtgagcaacagatagggccaatagatgttgaattctttctgagtgtgggactgtagcaatnnnnnnnnnnnnnnnnnnnnaaccaatacactgctaccttacgtagttgtaaagttacctttgccattaactctttgattgttgatcctcagtgtgaattgagttagcatgagcaaaacattcctctgacgtcatttgtcacacaaataaatcataatatcatttaggaattacaaggaaaagtagaccaaaatttgttctctacatggttttaaattttaaatcagtatctgcattttcaagggcataactttgtatccatactgtatgttccaaattacttttgaaatgtcgacaaaatggaagacatactttgaaggaaaattctgttaactgaaaccttccttgagctaatgtatttttgttgttgttccttctttctctctttctctgtctctctctctctctctttctttctttctttctttctttctttctttctttctttctttctttctttcttttaactgtgaattgtactatggttagctgattaagaaagaagtacattttatttgatgtacctagttagaggggaaaaagtgatttaaagaagatctaccagatgtgtgacttggctgtcttcatcagtcttgagaaaacagagtgagcaacagatagggccaatagatgttgaattctttctgagtgtgggactgtagcaatgagacaatgtctggatgcaattatttggaaagttcttgaccttttatttgtacaagttgatataattatgatttcatgaggaatagtttggaaattcttaagccaattatagctcactgtttatattgtgtcttggacttcagaaatcatggaagtgcttcctacttttaacttttatactatgtcgtttaaagcccaagcgactcgcttcagagagttttagtttaggatcttatatcaaataattattcctgcttagttataaaggggatttctgatggttttctgtggttgtttttaatttaaacattctttcctttcttttttttttgtttaatgaccaaaaagaaaggaaagaggttcatgaaaattagttcttactgcctatctaactaaacctctctttcaagtgacaacttcagaagccaccctctgctcatacctgcttatgtctgatgcttcccatccagtgtggaggctactactcatttgtactttcaagcatgtgagtgcaagtcttatgtaagtgaacagtgtgtatcagcattagagagacaacaattggagccacaacacgctcatatgataagaacccttgttaccaaggcctaggtcctgagtttgaacacaggactcatacaaaaagaaagcaagaactgacttgcaaactgtcctttgacttccacatgttcatcagaacataacactgtcttaacctgaagcctacacagaataagcacaaatttaaatatcagacaatagtggctaaagccagtaattttcatgtatgttgtgatactatttcaaaatattgaattatgttatgagacttttgtattataaatttttagatagtttttaataaatgttttaaaatttctaggaattttgtcatatttagtcttcattatattattgtagatatagttatatctttcttcatagtaaaggtttccctccttcctttggtgttgatttttttataacagtatcagaactaccattttccccatctctaatgctgtctaaaacatttcgtattctctcatcaaaatatatattttcttttaataactttcaacctgttggtttgtgacttgctttatttatactcccctttctcttcccatctttcctccaatatttgacaatattttctatcttttatactttttcatctacttgagtcaatgctatggccacaatatttcttttcctgaaatctgtaactcttaactaatcacataaggatagcttctgtattgtggaataggtcttgttttggacataatgtgggacatacaaacatatccttcgttcttgttctgtttacatcagcaaatgcattttacctgtgagtttcaagaatatttgtagatattatatgtaagagttctgctactttctgttggtggcgggaaacttctcattggaataacacttctatgaccaacgtctcttaatgatgaaaatttatcaaattttcatcctgagagtttgtgggaataattgagagccattttttctgatgatattatagaaaacatgagtgaaatgactatacctgtgctgatgtaccactgtctctctttcggcaagcactaaatgcatgtatgccgttacctaagcaatgtcatatccaaaatatatgaaaatatgttatagctatactttatttaaatacatgagaatatattagaattatacttgaattacattcagtatcatgttacttcatcttgtttctaacaagatcacttactttcaccttatttctaatattttagcattattaataaaatgccattacctttaactttcccattttatcagctattaagtattgctgattatagcttcatattctttacatatcaccaccattattgtctctggattatatttcctatatgactcagcatatataatatttttatttctctaagctttattataattcttgaatcattagaaataaatagaactcttctagactgattcttcaaaacttattacagttgatatttagaaaatatttctacatctgtacccttttttgatatttctgaactctggatgtaaattggtgctctttaatatagctagtatcacaacgatgacttttttaaaaatttttattttaaattccagattttattcccctccaggtccaacctcaaactgttccacatcccaaccacttcctcgctcccctgtgtccagtattttgaaggttaggtgcatcttctctgactaagcccagaccagcagtcctctgatgtgtatgtgttgggggcctcnnnnnnnnnnnnnnnnnnnnnnnntcactttgtataccaggctggcctcgaactcagaaatgcgcctgtctctgggattaaaggcatgcaccaccacacccggctgagactgctgctcttcttacaggttcaccctcctcctcagcttcttccagctttccctaattcaaccacaggggtcaccagcttctgtccattggttgggagcaaatatctgcatctgactctttcagatgtttgttgggcctttcagaagacagtcctgttagctccctttttgttaacactccatagcctcaataatagtgctaggtcttggggccttcccttaagctggatctcactttgggcctgttgctggaccttcttttccttaggctcctcttaatttccatccctgcaggtctttcagacattaacgattatggatcacagtttgactgtgggatggcaaccccctccctcacttgatacctatctttctactggaggtgggatctacaagttccctctcctcatctatggctcctccctttgagtcctgaccgtctcgcacctcccagatctctggtccattctggagggtccccataacctcctaactccaagggttgaatgtttccattcattctgctggtcctcggggatttcagtccatttcctccacccagtacccaatcatgttcccctctcctctccttccatgaccttttcttcccaggtccttcctccctccccacttgtggttgctttcttctccctcccaagtgggactgaagcatcctcacttgggcccttctgcttgttggcaaactgtcctccaattattgcaggtactatttgcatggtgtaggtggattctctggtaggcaacaaccatctcactcatgcttctgatattgtctaaacaaaattctactctgttgtaagatatatttgctttgtcttgcaactaaatcaactgattttttttgagatacattacttcttggaatgtgaaaataaagatcctcaattacttattggaccctcaccatctggcttacatgaagagaaaccttaaccaaagtgaacaatgccgtttcctaatgaagagtggggcatagctcactgtaataacatgtatgtgtgcctttggcttgtcttgtacagatactttttatggattataattattaataagatgtcttaaggaaagatattaattcctccagggataaatgaaacattttataaagttgcaattttctattgtggtgctctatgaaattcaactattaatgactagcttacttttaggaaacaaccagtacactaagatagctatatagattattagctattagtctccatatatgtaagagcatttcacttttagtattcctcaaattactttctgtggggaacaaaaagcctaaataattttcattatagattagtaaattgtccaatttgtaaaggcaagttccaagaatagagatgtcaaacagcagcataatttttaattaataacacatataatatatattttgtcctttactatttatgaatggctctggtttataaaatggtccctaatggaggaattggagaagggactgaaggagctgaggaagtttgcagcctcatgtggggagtaactgtactaacctgccagaccgtcccccccgccccccgctccgaagctcccagggactggacgaccaaccaaagagtacacgtggagagacccagtgctctgaccacatatgtggcagaggttggccttgttggatatcaatgggaagagcagtccttgggcctgagggggtttgataccccagtgtaggggaataccagggctggaaggtgggagtgggtgggtggatgagcaccatcatagaggcagggcacggaagaaggaatggtggattccagagaggggacgtggaaatgtacaaatgaaatgtaaataaagaaaatatctaataaaagagaaatacataattaaataaataaaatgattttttaagaatgactagtgcataacagtcagaaaatgtgatccaagaagaaatgatatgagttagtacagacctgttggggaggtgttggggatgcatccaaaggaagtgtgaagaactactaccacagtggaaataagagtctacatcatagacaaagtgaattgttacgtgaagagtttaaaaataccttgaaagagatagctggcaatgtgttggttaacaggatagcctagtaaatattacaggcatgtaagctctttggcctcacttgcaactagttaactttgctctaggagcatgaagggagcaatagggagaagaacacaaacaaatgaatggagctgagttctgataagcatgaatttagaacagcaggtaggcaagatttgacttgcatgaagtaatttgctgacctctaccctagggaatcaggaaccaatggacggctttaaagcaaagatgaaaggtaattaaattaaatcctgaatcagtacagaaaaaaaaaaaagatagggggagagagagagagagagagagagagagagagagagagagagagattgaacaacacctttagaagaccgctcattcacttttccaagtactccaagtagaggagagaagtgttctgttaggttcttcatcctggatggacctacagatggttagggaggcagcatttctcagggtgtggtggttggtgttatagatatgatctaagtgatatgaaattcataaaagtaaatgtaagaaatcattgaaaagactcaaaataatgcccttagtgattctatgtagtacttggacaatttaggtgactaaaagagcatttgtgtttatgtgtctttctatgcatatgtgcacattttgcgtgtgtgtgtgtattcgtgtgtgtgtatgcaggtgcagtctaacacaccatggtgcatttatgaaggtcaaagaacaactgtttcatatatccccaacgtataccttatttgagacagcttttctttgtcagaagttgctgtgtagactgaaatagctggtctgtgacatagtggtcgtcccactgcctccactttccatctcactttagaagacatggagttacagacttagcatgcacactgtgtattctaccttgtactcagattctaggtattcagactcaggctcccctgcttttatggcaagtactttaacaactgcaccatctcccaagacttaaaggtggaattggaatgagctcgaaagaaattggaataataagtcccaagttaattattctattcgatatttagtttctacctgtaaagaatgtcaaggtatgactgttattcttgatagaaaataaggcttaggaagttcatgcttaagttcttctttaaaggccatccaaataaattgagctcccaacaatgaaatgtcccagtagttttgtgccattgtctataatttaaaaggtaatgttgccattatggaaactatgaaatggatattcatatttttactctttctaaacaaaccagtagctcagaaaagaacaattatgtgttttgtttaaaatcacattttactacaatgatagatgcaagatcagaatgtttctctgcagtggttttaactcagacatgtctgtgtcttaacatgactacccagtgtttattactagacatacagagagcttaattttataaaccgtaatctacttagaaattatagagtatttcaaaagtttaattctcataacatttagtaaactataatatagtatgtaattgttatcatggtcactttgttttatttaaattaaacacacatttattaaaatctagttaaactataatttttagcttcctgatatgatttgaaaactatacaaattttaaaaggtcacagcattattctgaagctaagacaatgtgtttatcagttttgcttctccattccatttcagaaaacaaactattgccatgtgtaaatctatctaatttacagaacaaggataactgatataataaataaagctattggaaagcaagggaaatcttacgtatgattttatgttagacataacttttatatttgctcattgctaaatgtgccttcaggtatataaggtaaattatagttgttttcatattaaaatgtacaaactagtatttgcatgccatatagatgacatattgaagaaaatataaatgacatgcaagaaaataaagactttatggttgagtaaattgtttactttgaattcataactcctatgtttttgacaaatttattaaaaatagggacttgcttttatgatggaaaacatatgttttacagaatcttaatcattcctcttatctgtgtgtagggttttcagtgaaagaggaatttaatatgtaatcctggcctgtcctcatgtagaccaggctagacttgaaatcacaaagatctgcctgactataaagagagcttcaaacctacaaaaatgaaatatacacgcagaaaatgggctttacagagaacctgcagtcaccttatgcctatttttaaaacttctttctgtttcggagagaagaaagttttatccaccttaattcaatcatgaggaaattacttcaccctcgtggtcctttattaaagttaaatacatattcagtatcactcagaaagagtcttgtgagaggaaggacaaaatgtgccttccttatttttgcatgaggagttgctgttaaagcaaagacttttaaatggaggtgaaattagtattgcaagtttactaggtgcatatcaagtttaatctggctcctggcctcataaataattctggaaagttattatttggcttcctattacataatactgttgatgtaatgctcttcttttgaggggcacagaaggcaaccttatcttttggaaactcagaacaattgaagctgcagctgcttgtttggtggccagctgctgcaaggcgacttctcttctgtcccctctcccattgctatttcggttcttagattctgtaaggaagctaatatcaaggaatgtcacacaaacagtgggctgttatgaggggctctttgtgagctctctatctcttggtattgatcctgattagcaaccaggaatcatcatcagctaagttcttgacaaggtcattccatgtagattctttccctgaaagatttacttttactggagctgactgggccttttaaaatccatactaatgtgtggttccttacacaattgtcagaatagtgtaaaaagtaacgtcacataagccactttttttttttcaatttcttttggtattgcaaccttttgggaaagatttgaggtgttgcctaaaatctaagtttgcattcagaaataccaattaaattctgattattaatcaaaatttaagtataaatattgtaaaaattcacattcgactgggagcagtatccttaggcaaatttgcttaattccaaatacaaaatagtgtccgttaacctgtaccagtgtttaataaacagtctgtagcttagacagtgcattcttggtaagctcatgaatttcccatccacttaccagaactcttagaatttcttctcttatttaaggtctcttcagcatcctgtgaaggaaagacaataaaaagataaaccttccaaatatattttattcattttctactatattttacaaggtgaatgatttatatgtttaaaatattctagcacaaaacaaaacctgaacaggtggattttggtggaaaaataaaataagttttattattatgcagcaggacaattctctttctttcgcccattactttgggtagaataaagtagacagctcatgctgagaaaactgagatgtagacaatgcaagagctaaaaggcagacaatccactcagtagtgtctccagcatggatccctgaacactatggcgagccatcccctttgaatgaataacaccatgaacttaactgttgcttgctttcagtttggaaagtcattttgtaaagagagaatgtaaatgatctcattgttgtggttaaatccataaagtcccttatttccccatgttaaatgtatttgtataaaggagccagtgacaattattttaaacacagcctacttccccatttgaagtgttgtttttgtaaaaggaaaaatagttatgattatattggtgtatccttcagtgtgtgctggcgatgtccatataaatgtgtctctttccaaaatttcccattaacctgagatgatttaatcttggatgggttagtaatagatttgagttctaaatatgtgttttcaaaagatgtaattatagttttatcaaatactatacagaaaaatatcatccttcatgttaacaaaacaagttttgtaaacctttaaattgaatcaaatattttctacttttaaagaacttaattatttatcataggcaatattttcttttctttaaaacaattaaaaagtaacatttgaggagcaggatttttgagactgctggtccttgggtatatgctaacatcgaagtacttggtacaaggcgtgttttgcattaggctgcacacctgatcacatgtttgttggaaggtttccagagtgtggtctggaaggtactgttacttccaacttgtgccactgaaattaagatccactccccagagagtacagatgaattaacacaatacgctccatgtacagtgaaaacaaactaaccaggatcactgctttgtttagatctgagaaatgtggcttagcacatagggacagaagacagaatgaattctatttctgtaaaagtagaaacaatgatttccttagctttgttttaggcttctcaaagatgctacaaccctatgaaaactacggctctgtgcattccaaaagcaatactttcctacctttccctttgcttatttgcagtttattatagcataaaagatagacacatgattgggagcaaaaaaaaacattaaaaatcaacagacgtcgagctttcttatttgtacacattaaagccattttatcatcaagaaagcatcaatgccatatcattagcaaataaataataatcactcagacatgaagaggtattcaaagactagagggttttggtgatgaagacaggagaaataatagaaatgtgcttagagctgttgttatatcttgtagggaatatctagaaaattagattaatcaaggagcagacatttggaagaaagtttgtgtgaatgcctgacagtcttgctctttccctcatttcagatgttggcagggtagcaggcagctccaagggaaatgtgctcctttcatacttgagtaattgatgaattgtatgcaatatgcaaatgagaatccataaatcttatgaatgacagcttaatttatgtgagccttaatgaatgcaggattagattttaattaaatatcctcaaaggcaccctgagtagtagatttttttttaggccctgttttttgaagacttgtttctcttgcaatgcattttacaaaagcaaaaaccaggcaaagaacttcgcctacatttaatcggaagccattgcttcgctttacttaaacaccagcaaataaactgataagtcctaagccaaatgtatgtgaatctctttattttctatatatttcagtaaattttattacttttaataactattggtctctgttgttatttttctattcttaatataaaaaagttattataactttatcaaaaatgtctatcactggagtgctgtttaataagatattatggagataggtaaacattttaactaccgaatacaattagaataaaatagggtcttctaagacagtttgttattttataaaaattgacacataatacttaatgaaataagataaataacagaggttttatacatgatatttaataaggactattgcatcctaaacttagaatgtaaacatgcattctccaatgaaatagttgtatctttaatttttattaacactttgaacttgaatacaggtttttcattagttgtgtgttagatgacaacaaaattgcttttctgtggagaattctcttttttaaattaattattaaaatgcacacttgatatgttgtttacaaaaccagtcacctgttcttcccatttgaaatgtttcttttgtgaactcttactgagtttatattttcaggactcagaggttcctactaagtgagtgttaagtcctgagtgttaatgctacaagtgcctatgtgaatataagggataaaaaatataggcaagaatttccattataagtggaaaagttaatagaggtttgaatgaagtttattcactcaaactgagaatggaagtttctagcctttcaacaagaacctttatcctcagtctaagataggactgtctgtggagaccctggaatatattcaagatatatttgtgaattgatgactatgtttttatatatgttcagaatgtccaccagctttctaaaggggatcccttaagcagtgctgaaatactgtcatgcaaaagttagttacaaaagcagagcctcataaaccaaagtgtctatatgtgaaaccagcccaaactgtataatccaggtatagctattaaccaattaattgtgagatacccaagactcttttagccaaccgactttcagcttcatattactaattaattgttaacagcgtattgtttattggagaacaacatctaagcagaatatcttgcatttttgtgttgctttcgataacaattgctatctctattttgatgaatttaggagctttttctaacgtaaatatcacattcattaactagctaggcaaggaatgtttcctgacaataggaaaagacaaattatcagtgtggcatgatgatgcattcctgtaatcccacgtgggtaactgaggccagagaatcataactttgagaagaacttaggaagcatgcaaagaccatatcttaaaattattccctgcacacaatgacaatatagttggaaagaacaaagcgatttaaacaagaataaggatatctatgttttctcaatatttcttgagggcaattccaaatcaatacaaggaatctcactaactcttccttctaagcacacagggaaggacagctctgtcctctcctgcccttcttaggcctcatgcccctatttactgtttacttagcttatgaagaaggccatggatactatatttagtcacaaattaaacatagtccaggaacaatgacaacgtaccgataagctgaaggtaaaacttgggaatcctggctcaaaaaattaaagcttatttcccatcttgttaagcccactgctgttttatgagtacaccttagtctctgtcaacacatttcacactgttgtttcaaagaacaggaaaaaagggggaggaaaatgatataatgctacattggagccctttaaaatgcaccaaatttctcagctcactgcaatgacatttttcaagtcatctccaaaccttggagtaccccactactaagcctcaagtttcaccctgaaggggataagaatgctcaggaagagtaacagagtcaactaacatgaacccttggagctctcagggcctgaactaccaatccaagaatatacatgggctggacctaggtctccctgcacatatgtagcagatatgaggtttggtgttcatgtaggtcctgaacaactggaaccaagcctggaactgaatcccaaaaatgttgcttgtatgtagaatatgtgctactagctgggctgccacctggcttcagtgggagaggaaattcctagcctcagagagaattgaagtgccagtatcggggtgatacccatagaagacccaacccataagaagggggagggggtaaggattgtgggagggtgtgacagggaggaggcagtgagctggatggaaagtgaataagcagaaaataaatataattaatttaaaaaaatagaaaactcttaagcaaagaattttggtggtgaaaatgattttgtcaggagtgccttatttatatatatatatatatatgtatatatatatatatatatatatatatatatatatatatatatatatacatacacacacacacacacacacatatatatatatatgtaggagtttcccactgagtagcttgtatttattcttagatgttttgtggtggttttgtgctttgctagttttattttatttatttatttatttatttatttatttatttatttatttttgtgtgacaaagtctcattctgtagtctaggctctctgggaactcagtgtgtgtgttccaggcttcagcctccctaactttagcattgcacaaacaggcccccattcccagcttcaaaatggattactgctctataagtttcctttaaagaaaaaaaaaatagaagaaattttatatcttctacccaaacacataaaattcagtatgaaaacagtattgttagcaagtcaacaagtttcatgaaaaatggatttaggatgatatagatataaacagtttttttcaactccctaaatttgcctagaagatcatgaagtaaagccaaagaaagatagattcctcatttttatcccatatctcctactcatttacagaaaaataacattttctagctgtatctgtcaagaaatactttttctaaaatagaaatattaagtcttcacagtaaatatattgaagataaagcttatagataaagcttcaattgcctaaaaacatatttcccaatattatccactcaataaatagcattatagtacccatagtcctcagaagaatcactaaagtatccaagaatgtaaatgtatttaaaccttaatgtgctgaacctcttaagacataaaatcatttaacaaagtagtaaggaattatatgtaaagtattatttcaagatgaatattatatgcatttcttttcaaaatgatttagaaaagaaaaatgttggaatatttaaatgatcacacaaaataaacaacaaagttaaaaataacttcccatgccatggctatagtgaatcaaggggaaaataccaactaatgtgttttcattcttcatgtgacttgggtaatgatattatcagtagttctttggaaacagtggatggaatgaaaatacagtgaccttaattggcatgtagctatctgaagtgtctaaaatcatgctgttttaaatgtatgcagtgtcatataattatggaatttggaatacccacagttaccaaatgaaagtggcatttaagtggttggccctttaattcagagcccttagtagatggaaatatgttcatctcgtacctcctctagtgataattattattgcgttgttggatcacatttctcgactcttgtgtaatttagctctgtcagcattaatctcttggatgttcacatcagtggaactaaatgtctgcttaatattatggtggtgatgcagttgtcatcttagtagaaaaaaaaacaatgaaaaaaaattagtgttagattacttaaatgtaggatcaaagtttctggcctagtatctgaacatggatatttttaagaagtcatatttggaaatcattttgtaattctctcatacagatctaccttggacttgttccttgaacatgagtaattaacttttctctcctttctctttcattactgttatcattattgcttctcctattagcaaatatttggggtaataaataaaacagaaaagctttttataacacagatttctattttctttccatatatgatcatagctgtatttatcagggtgtgggaacattttgacaggtgtgagggatataaagtcacctttgcaagcaaaagaactctctgataaagtcatcatagtcttgataagaaaagttcagagaccatactgtttgatattatgcattattttattacttttgtattgatcttcatcatttatgttgacagcaaagcattgacaaagggagactcagtggaaacatttatttgtacaaaggacccaggtctacattttataatttttacatcatgagctagttagcaagcaaaaagattcaatatttcattaaatccccagtcttcaaagaatctgaaaacttaaacaccgtgtagtgctttggaatttaaaatgaatgaattccatttatattacagtttaatttagttagtcaaacacatttgttaaacatgattatggctgagccttgaactagacatggctgacagtggggcagagaggaatctcctgcctggcagggatgcacatggctttaggagcatgagggtggatgctatacatgacaaaatgactgaagatcaaataaaagaatatacaatacattgtttatagaaccataaacatataaacatttgactcaggcattgtcctggagggcattatttattcctagcctgactgtgtactaagtactgctacactgagtttcctgatgaagactctgttccatttttaagttaggacattgccattcactggcccatgtgtaaaggccatttctattagaccctattgctggttatttgtcaatgttcaaaattcattgttttagagatgatgtctctgccctaccaagctaaaggtaccattgtagaattctgttctctaattttgtctgtctgagcaccatcttcctgtaccacaaaataaactctcaattgctgacgaaagtaccagtaaacaaagacaaatgtacaactgcaagtgggaaatctttaatgaaacttaatgagacttttctgaaagagcacttttaaaatacttgatgctatgtttcatagctgtctcaacgacactgagaatgccactctaaatgctttgatttctggaacaagtttcttatgccttttttattcgtgtatgaagatttagtatgaatacaaaagtagttagatttatgagaatataggggttcaatttggggaaagaaaactaacgaagaggcttgtgatgccaaagaaagacatgtcttctgtgatgttccttaaacagtaaactccacgatgaaatgagtcattctggtggtgggtcaaaggcaacatttcaaaggtggcctacaaaagcttcatttatttctattcttaacaaatcatagaagaggttcatccacacagaggcagcaacctcttttaagtccaaatactcataatttaagttttgaaacttaattgtcaattatatttttgtagagtctagttgattgttgaaaacaagaccccgagaagtgtagatatattaagtgatgacctcaatcaagaagagtacaaattccaaaaaccagagcaacactggtcacgagacagaacaagtgtcagatccttcattttcctaaagattcttcgggccattactcagatttctttttcctggtgacagttactataaagcaatggctaaggtgtctagattaggggatttgtagaacatccagccatcactattacctgaaaaccagaagacataattaatgaagagaaaagatgatgagatagaaattatatatttgaataaatcatcagctagtgttgggggtggtgattacagagcaaagaatactacagtgtagccttagaggggaggtaattctaagaagcaaaaatcttgaagattcaatatttcttataccctattgctgataaactaaatatttttagagctttttctgagcactgaagggacaaatgtttcaacatacatgcttgcttgcctctgtcaatatgcttttccctctgctttaacgaatactatttcattatctgtgtactcacaagtaaaggaaatacattcctccttccttttatttttactttattttaccaaatattttaaatttttttttgttgttgttccctatttaatgttttgttgaagtgccctataaagctattcctttccacatgggagcttattcttctctttgtttatttatttgctctagatattgaaggtcttaaactggtaaatgctattttgaggaaacatgcaaagtgggtcaaggtctttttaaacattagaacacacagttcatcaaaggctcaggatagcaacaggtaacctagggtgtagtatatacatgttatacactggttaaaaacagtgctctgaatgaagtactccagaattaattttggatgaagaaagaaagagaattaagttagatacaatataggactactaagcacaaaatccatatgttgccttttaaatgtgagtataagatttctgtaaaatttcaatatgaatattgctactagagtctcagttgtcaagtactgtttctctctttgacgttttcattcctcagaaaatgataaaatggacaacttaattaaaatagtcacagtataatataagcataaaatgtgaaagaggaagaaatctaaaagatgcagtcaaagctgtacattggcttatatggacacataatttttaattctttactccttggaaactaaatagcaggcatagaagcacagaatgaatgtgtgttttgtgtagtggtgtgtgtgtgtgtgtgtgtgtgtgtgtattccttgcaaactctctgagagactgtgttttcatttctggtcaccacctcagcaaactaatcaatgaggcatgaactgctatcagcagtgagagaaatgaaaaataaaccacagataatccctcagttaaaaggttattctgtgtgataaaagctattttgttaatttatttacttactggtacagtgagataaagtgggagtacaattagggaattcttgctgaaaggattttaaagggcaatgatgacttcatattttgtaatatttgacatataaaaacattttcaaaccaaaattttattgctcatgagattccaaattaattttgcttcagtttaatattttaaatacataatacagttcattctacttaataaaaataaaactaatcttttaaatgaatgtatatctttttatgaagtatctcttaatttgaatagagatggcaattccttagaagagaattcctatgtttcaatattctaatagtaagagaatggtgaatactttttggataattgtatatttctcactttctcacattttgagtctaatattaatttcctttctcttgtgagactattgaatcctggagaagagatttgtagaataaatattctgcagctaaatgttttgtgttcttgaacagaaagtatatatgaattgttatattaataggataaagcttatagaatagttcatactattatggtaatggagggaaattaataagcaatgtggaactggaaagattagtggagaagctgaggagaacaagtgtaggcttaacatagacaattgaaggaagtggcattctacactgaaggacaaatgtacacacagcttggacatatggaagccgttaggcaccaactataaaccagggtgagaatgataggaaaactttgcctgaaaggagctgaagcatttaatttagagagctttgaatcctgtgataagaaccctgaaaaactttcagaaagcactggtggtgttataatgttcactctgtaattgtcagttatgccataatcaaaaactgcagggactcaaagcaaaggacctgagataaggctgcatcataggaatgaagaggacagtggattgggaaatatagaaggtaagatgagaacaacctggggactgagcagtgtgaaggacactggaaaactgccaagattctggtcttaggacctgggctgtacaggattgtcaccagtcgtatggaatccattaggttgtgacatgcagggtcaaagtagacaagaactgtactcaaggcatctggaggcacaggcaaaaagtctagttatgtgccacagcaatgtagtttgtggactcagctgaaaagggaaacatcacttccatattctccgaagttcgtttttactgctgatgattttgagagcattttcatctctagaaggaacactaggtgtttggtttgagaaaaagaatttttgttactttttaaacaaagcatactgtaatttatttagaattcaccaggtgctccaagagtccaaaatgaaatttttattatttatcttattttggggggtaattatagttacacaattttctctttttcttttctccttcttctttccacctcctcaaaaaatcacagcttctttttgattaagaattattgtataggtataagcatataatatattgtaaatattgtataggtataaggtataataatatacctactatgtataggtatatatgtgtatactcacatacacatatatacatacctgtgtatagatagatatagatatagatatagagatggagatcgagagagagagatagtgatgatagatatagagatagatatagagatagagatagagatagagatagagatagagatagagatagagatagagatagagatagagatagagatagagatagatattcacacacacgctcacacatatatacacaactgaatggatctgatgaccattaaattgagacgtggagatggataggagatggaatgaatcctctgctttggtttgtagaagtggtggcttctactccttctaagaggaaaagaagtgcagtttcaagttacttaacactccttagtttaatctacaagaactggccaatggcatgaatttggatggatagcaaaatttcctgtgatatcttcatacaaaaaaaatctagtagggtggaaaaaggacaacaacacagaggaaacttggaaagacacaaaacactagactgtactcctgaacattagggtgtagaggcttgcatctttcccttattctcttggttcacacttctagctgatcatcctataataacatgagctcacatgggtattcatttcagttttgatcgttttatctcctatagcctcctcggatggaaggaaagttgtggattccagaaggctgagtgacttgccaaggaaaggcatgtaataaatgatgccttctgtcttttgatccatggcaaagtgacctttgtccctattatccagaggtgccagggtataatggaataagcacaggctttgaagtcacagatccatggatcagacacggagatctgaaatttatgagccatgctattgggacagtctgatctgagttttctcatctgaggagcagaagtaatatctgcagtacagtgctgggatttaaatgagatagatattttttacttggtacaaagtaaatctcctgaatatgttaccctttccctttttcacattaaagtcaccagcacctaaactacttacatttcaaactaaagagactcaatggagccagtgtgcaaacatcagttaactgactaggttcattctctgggtcttttgtgtttctttgtctaatgcctctcacacccttaaattttaaaactcccatttatgcttcttagtattttcaagagggtgctccaaaaccaagttaacagtttccctgcaatgtagaagtattctcatgggactatctgcaagatcagtttaagaattaaatggacctattaattctcgattttcttaaaggatttaattgtattaagtcgtgttgaactaggactttaacatttgtggttggtctggtcacctctcaaatgtactcaatactagatgttcaaatgcagctacatgaaagcctttgtatatgtcatccttctacaacactaaaccataacgaacatccagcttaagctatcctgtggggaaaaggctgttatacatattttattgctaaaaaggggattctttcgttatttcatggtagacaagtagcataaagtagaatattaatgcagttaccttcattctggatgtgtgtgtgtgtgtgtgtgtgtgtgtgtgtgtgtgtgtgtgtatgtgtgtgtgtatgtgcataactatctctaatcagttagtttttcaaacttctttactgtttcaaacccaactataattctttctgatatgctgaggcttctgggtaccatggcaaaggtttcctctcatgattcaaatagatgcttggagtgaaaacttttctgagaagacacaacagaaaccaactcatatggaatgatattcagagctacagtgagcatctcattaagcagtgatgctgaaggagatgaagtattaccatgatgatatatttattttaaatatctatagagactaatttgtgagtgtcaatgatgatagaaaaaattatctttattacattattattaactttaatagtataattgtttaaaagaagctatgaacagactatatatatacatatatatattacatgttatgattatttatgaacattagaaattagatttctttccataattgtttctggatatgttacccatttatgacatttatttggttagaatgtaacctgctctgaagactggttttatgtcgggactgtcaatatccatttagttcttggtcacattttggtttgcagaaataaaccatagtctagttagttgatttaataaattgtgtcttcctaactttattgcccttagaaaagcatggtattttaaaatacagaaatgttaccttttaaagacagatttccatgagaaattaataaaatatctgggcttaaatgtaagatcacttggatgtataatgatttaaaccatctgttctttatttatgtattgtggggctttatatagtactttttgtggattaatccttatctatcaatgtgctttggtacaacataattataagagaacaataatatatttctgtcagctaccattcattcaatgttttatgcacatttagtctattgaattaatctctgaaacaatggaaagaaattctttgctagaaatagctagcttttgccttggctttgtgggagaatgacattagagaacatatatagttgttgaacctgattgctttaacagccctgaggttgatagtatcaggttccagcttgccctgctaggtcaacgtggacccagtcctttaaagagaaaagttcacacaaagttcacttctattgttttaccatggttacaaaacagagataaaaaaaaaaaaaagaggggtgggtttgtgacctgttccttccttgagccctgtctttctcctgaattctttctgattttaccaatcaaacactgcaacagagaaaactaaaacatacaatagtttgtaaatgtgtaaggcctaaatatgctttactattgcttgtaggtaatctttggatgtagatgaataatattaaagtcattgcagcaagaatttagcttagcttaatttcagtgaaaatattatttaattccttctccactaaaaattaaaatttataaggtgggtgggcatggtggaaaggattgttaattggtctggaaggataaatgtaataatttcttgaaaataatttaactttgaccaaatatgctgaaataattgctataatggaagggagagatcagaactaaaatatcttcgtttaagactttccatttttaatcttattcaggtacttttgtttatacaaatttaagaggttgtactatgtaagggactattatgcccttactcagagaaatatatgggtatcttttgaaaatatgtaaaagcttaattcaattcagtttcactgccttgatgttaagctactaagtcagtgaaaattttttcttctaaattatttatctattagctctaaaggacttgagtacaatttggtttattgtatttgattaaggttgcaaaaatcttatggctaaagcaattaccctaagctattcttatttttaaaattattgtcgagatatacagtgtagtgtgttatctatatagctcaaatacaaccactacttggtgttatttatttttatcattctgtgtattttgtttttaagtgtgaactaatagtcaaagaaaagtaatttcaagtagacttgattagtggtcattctgcctatgactccaaagaaaaatactatttatagaaaagggtataaaccgatgaaattttaaatttgacactaaatatatgtttaagaaatactttttagatactttaaagtctgttgtcataatagaaaattactatcttccatttatactattatttaaattgaagaatgaaggaataaatctcttaagatcaagacagaagtgtgatctctattgtctaattatttattgacctttactcttttgattggcataatttcacctatgtagagtataaaatgtaatttttcatgagttaggatgttgtgaagaaaaagggagggtcaagtatttacatagaggaggaaatataaaaagcattgcttgtaaattttatatcttttatattcaccaaaatgactcttgtgtcatacttcatataaatatatgcttttacaagaattttcctgaagtaacacatcttaatcttaacatatagtgtgcattctttctgcatcaaacagttattttaaaatttttttatcgaatactttattttttttacatttcaaatgttatcccctttcctgttttctcctccggaaaccccctataccatcctccctctcactgcttctatgacagtggtaccccaccaacctattcactcttgcctccccaccatggaattcccctacactggggcatcgagcctccccatgacaaagggcctctcttcccgttaatattagataaggccatcctctgctacataggaagctggagctatgggttcctccatgtggttggttggtggtttagtctcttggagctctggggtaggggttctgtttggttgatattgttgttctcctatgagttgtaagttttgttttttgtttttgttttgttttgtttttttttcattacactttggcaaaatgctttggttacacttaaattatactcattaaatctgaagagaactaacttgtagaaacttcagtactgttaatgatacccttgaattaaatgaaagctgatgaataactaagtcaggcagtagaaaacaggcagagtgtgacttatgaattcagaggtcacctattcctttccttcctgcagtaagaccttacctccaccctttaccatcaatgagttcttccccagagagagtgtgcagagaccttccctggtggcccattctaatgtttacctgctctaattagggacagaactttttttttcatatcttgactacataccttgttacagtttaagagttggcagttatttttagtgttatctttctttttttattgctgtgtattctaaatatattattggccagattttcccagtgtatgaagatttagggaaaaatcttaacatgttttccaacactcagcctagaatatgactaaatatattttacttaacttcaatagccttgacgtcatgtcttcttgctcttctttgcacctttattcccattcggaaaacgacacaattatttgctttcatgtagaatagcccactagggtgtatttcatctctttgtcatgttctaatccgttgaaaaactgtaatatgcacaacagcaaaaaatgagttttccacaaacaaactctaaaaagtttttgaaatttcttctgtaaatgaattcttccaagcactataaaatttcaatagcagttttgagaagactgtatgttttgtaaataataaagatctgtgtaatcatgaaagcatattttagatagataatcaatgcatttacttatgtacaattattaatgtcatcatttgtatcttagagaaattcttgaccccaagatctcttacaaagtctggtgatgttcaagtcccatacaggaaatggtcacacaatgacatgtgacgtactcactgatgtacaatgacatgtgatgtactcactgatgtacttattttttactattgttgagtgaaacaaataaaacctttcaccaggaaaaaatctaactattcagcatttccccaaatttatttttcttaggtaggagaaactaattattatttctctgtacatttcgtttcatgtcattatgatacttttcttcttaaggaatgaactgcccctttttccaccttctacattccaattattctccaagacccaaccatctaagatattgtgagttgtttagagctaactatcctattgtcctggtctgttgacagtgttacaccagaacaaaagcaaaataggaccaaggagacacaagataaaaagcatgggattccttattttaatttacttttcatttacatttaaagtattttatttttatataatgaggcctcaggcattgtaggcaacttttataccattgagtaataccccagccttaaattccttaatttgaaaaagggtaaggattcaatttggtgataggcaagcattgaactaataggagactccttagcaaatatgtcctgtcctaatgcagattgcatactttcctcattctttccaaggggtgctcatgcagtgtgcaattcatacctatcatgtgtatttcttcaatacaatctgcatcaatatatgcgtatctttctttttttaatttattttttattaggtatttttctcgtttacattttcaatgctatcccaaaagtcccccatacccaccccccatcccctacccacccactccccctttttggccctggggttcccctgtactggggcatataaagtttgcaagtccaatgggcctctttttgcaatgatggccgactaggccatcttttgatacatatgcagctagagacaagagctccggggtactggttagttcatattgttgttccacctatagggttgctgtaccctttagctccttgggtaatttctctagctcctccattgggggccgtgtgatccatccaatagctgactgtgatcatccacttctgtgtttgctaggccctggcatagtctcacaagagattcttagcacaaagttataacttccccaaatggcaaagttttaaaagtttttcaaagtttttaatctagtaaaattgtttaaaaaccaaccaaccaaccaaaccaaaaaaaaaaaaaatagtagtcagatgtgattatattgatctatgactgaacaggaattgcatttcgaggaatgtttgtgagaagtaaaacattcagataagcatttcagcaaaggttaggtctgaaacatcttacagaaaagcactttttacaaatatcacagtgaaatctatcatttattaaaaagctttttgaagcaatataagtaaccatataaacacttcctgcggaatcagactcatcataagtgctagaattagttggaaacagaggtcaatggagtacaagagggtatacagtatttagctgatgttaatgtaagaggaaattatgttttgagagactgtgtggggtggatagcagatatgtgtacagaaaagttgcacatgccatgtctatgcatgaagtggctggaataagtaagtagatttcctgttatatcattctgtaccttttctctctttagagagagattctcactttctctgttgataagctggctgtcagacctcctcagaattcttctatctctgctttccagagccctggtgtttcagtaaaattcatggatataccatgggtccatgtgtgatagacttctaaatgcagatcctaatagttgcacaacatgcacccagtgagccctatcataagcctcagaatgaaagtactttaatgtaattcagcaatgggaacgtatgttaaaaattcacattttgcttggaataatattgtggagttgaaggaaattaccatagccaagtaatggtgctccctggaaagtgtttagcagatgaaataatgaagaaaatactattcataccttcgaggaaattaatttcatttttgtgttttgccagaattcaagaatggacgagctccaaagaaatcacagcacatgttttcaaaattctaatactaaaaaaaaaaaaaaaaaaaaaaagcagatgaattggaaaataatgtgctactgttttgaatatttcaaatcagcatatttgcaaataaacacgttattgaaattttaactacagaaactaactaaagtgtattttcatcattgtacagataaaaaaaatatttactcagttaatttcatcaataatgtctcaataaatttacgaagggttagacacacatataatattaattttgacctttttgattttactcaggaagtaaaatgttctttataaaatgccacttaaaaattctggagtgatgtagagttctgtccttagggaatattcatataagaaagtagtgcattccttgcctcagtgactaaagatgattctgccaaccagctagcctgagtttcatccgtagaacacacaggcagacgtagacaaccaatgtctactagtatgtcctctgacctccatatccatagcatagcacaagaacatgtatagagttcttgctgttagtattgagaaagatggctatggggaagagagatgaatgtctagaagcgaacaactgtgaagcactgaataaattcattatttaccacataacaagcagctgtggtggcaagcacctgtaattgggaggacttgaagtagaaatgttccaggcaatactcagatgcacatgagtttaaagcctgcctattctcaagagtctttgtctcaaagagaaataaactaagtaatggccacgatgacatctgactaccttgatgcttatagcttatggaggagaacttatagcaagccgaaaagaggatatattgggtataattcacttttaaggaaaataataatttgatttgtagatggaaatggtaataccagggtcttttggacacttagcaacaaaaatacctttcactggttttctgttaggaactgaggtagatagtgtctctggcaggtcgtaaattgcttagatgcctgtccagtcacttacagaattgggtagtgtggaatagaagaattcaaatgtatcaaaatcctttttaataaatccattttcaatgatgtttaatgattttttaaaaatgattttaaaccactgtatacttcggcagtccttgggtattttctataaacagatttttttttattaaaatgagttcctttcttcaaacaatccaaaggctaccaggatgcttgagcattgcagctatgatcactgaactgagatacatcaacaatattttcctatctctgttcttgtccttcaatcttgtcccagtctgaagtcattgtatgattacaggtacaaatctccacagaaagcattgtgagtggaaggatatctccttcaatccttaaacatcctttgacagtaagcattaggaacttctaagacagtagatagatctttccatacaactcagaattatcttagataaaatggattgcataaatagatacatatgtgtatacacatagatacttaggtacatatatgtatctaagtacataagggcttttcaacattgcacataattattttaatagaagtataacagacaaattactgcactggatttgagaaccaaataaacattactgtagtaaatgtatttttgttttttcatttaaaacatcatttctatattttctttttgaaaagagattatgtcaccattaagtgaatagaaagttttttaatgattgtgttaaattcagcatttttaaaaatatcttttttgcttaatttcaggtctctacattttcctcttttgtacttagcctaattgcttagggtatcagacaattatgcaatgcagtctttaggtagcatatattcattcattcatgtcttgacttgtagatagcacataacacatactaccatttgaagttcatattcctgtcctctacccaaacagtgaatgacatctgaagccccaaaactagcaacaacaaatccttatttttatctattgcttgaaaatgctggtctcttcagttctatggtggtaatttggtccacatattctcatgaaaagaatataaaatcaggaggggacaaattcatttgaggatgccaaacttctgcccagtgatggtttatgtcatctttactcacatattttctaacaggaagtcatagagcaagcccaaaataaatggcaaggcaaaggatggatggatgatcaaaacatccagttttgtcattgtaccctttggaatatatggtagggtcaagacaagagtaactaaataattaaaagttcttgctaatcaggcaatgtgaccattgcttacactctcaactcacaggtaactgaagcaggaccacttcagttcccaagttcaaggctgcctgggaaaaatgaagatgcttttttctcaaagcaaaaatagcattaattatcaagagtgaacttattaaatgtcttatactggcataagaaaatgaagggattatttaaaagtgatttatttaaaagaaaaaaagagcattttagcagtgtggaaacatacccaagaagtgttctaaaatgtagattgagatagtggtaaataaggtggaatacaggtggtgagatgggtatttgaaaaggcacccacacaggttcctaattagttactgagtaaaagtggctcttcagtatgattctcatataacctcttgaaattttaaggtctactaattttttctcttgtgcaaaaattcttgtgaattgattaagttgactttagaagggctctgttttttcttgctaattttaaagaagtaatttatggcttaatcctttaaaataaaattaacttttcatttggcagcatcatttttgctgttgtcagcaccacctttttcctaagataattatcatcatgtgttttaggaaagatgctagtgagaatttcagtgctttgctattttcttaacatggttcctctgtaaatctatgttattacacaaattcagtgttaccttttgcatgacaatattttctccatcaacatagaggaaaataaatttaaagtaattgcttttagaagtatattgttttaaagaaacttgtgtaaataaataggaagaaaagtacttactgatgtttgtttgctaagcttgctgaagtagatgttgatagacgccccaaattactttctttctccttttccagggtactttaagctaatcaagaaactaactcatagtagcaaatttgaaaatcattttgtaagaaacttcgttacaagcacttgatagggttctcatttaaatttactatcataaaatggaagcttatatgaaaatgctgtgcaatttacaatccttttaaagtttgagagcttattttacatttttccaaaaaaaatttagatgcaaattatttcatgttagcgtctacatttttttccttttatttccccccttctctgatgtttaaaaagtgggatgctgtcacacagactataatgggaataatgtggatttcacatggttttatttctgtttacttaaagacattcttttgacaggctgtccacgtagctctgtggtaaaacttttgaagcacagggtacacttcttagcactcctttctcccaaataagtattccaaagcaacctcgacaaaactattgataagaagagagacagaaactgagggttacctgtaatgtttgagtgcagtgacaaatatatatttgcataatttaagttgactgtgctgctagtcttggttgttaaggacagtagttaggttgtgtgtaaggatgatcacggccttgtatcttcacatagaaagctagtttgtctgcactgtagatggaaattttgctcccatttctaagaacagttatgtaaaccaggcatgataaggcatgccttttaccgagtattcaggaggcagtggcagtcagatctctgtcagttccagggcagtttgatttatgttgtgagttccaagtcagccagagttacatagtgagagacccagtctcaaaaaacaacaagcaagcaaacaaacaaacaaacaaacaaacaaacaaaaacccacagagtttgtttatgtttgatgctgtaaaactcctacattaaatgttatcataaatacatactttattgtgaaattgtaaagcaagatcccaattatgtgtctagtgttataaactgagttcaaagatttgcatattgaacatcttaattcgtgattttcgtctcaatagctttccaccagtttaaaacagtgtaggctcttttcttcctaaccacctaaatttgaacagcaaatatagatccaaagtattcagctagaaatatggataatgcagtgaaagttttaactcaataggcttcctcttcaccatcatacacaccagtgtgacgtttgatactgccagactgggactttgtaaataattactaaaacaattttgactgaggtgaccatacttttgaccatccatttcttcctacaactcttcattcttaatttgttttcatttaatatccattgatttctgactttatataagatgttgtgcttacatgtgtaaacaagagattttaaagcattatctttatggaaactgccagtatatacaatgatccatagacaaacaaacacataatatttttggaaatacagcagggtatttgaagtgaactgctaagtgagccgactgacatagcactcagtagctagggaagctatcatatagggagaccttattggataggattccaggaagcagtaaatagtgggtccaaagaggtgaggagaaagggtgttctttctaaagtagtatacagattgatagctgtgttatgaaaatgtacccacaatgacaaaattctgaaatgttccaggtattagtgattatgatgcaagttactttagaggtgaaatagttatatcactactgcaaaagacttagtttcactcagctctgatacattggcaatatgaggcactgaagattttccttgttggtttattctctctctctctgtctctctgtctctctctctctctctctctctctctctctctctctctctctctctctctctctcatcattgtataagtcaaagtcttcatataggccatgttgacttttaaccttgatcctccctaaataatacataaattacaggtgtgtaaccccagcattcatgttcactattctttcaccaagaaccattcgatttatttgtgaaatgggtctggtattgataagtatgatgtggagttactgtgaatattaagtcatgtgatgtttattgtggtatttagcatatgaccttttaataaaataaggcctttcactctttgatgtgactgtattcttaccaatgaataagggagatagcagtgtccatcattggggattaagctccatggaagaagagttggctagctatacaatacatagcattagattgctgaactttaaattatggtagtaataagtatagtatgataagtagtacccatctcaaaatatatgatataactctaatataataaggttacctattgcaaaatattcttatatttaaaaataaggtaacagagtgaactcaattccatgtctgaaacaaacatagccagaattgccatctcatcatagtcaatatactatattaagaccaaatgaaaatgtttggagaaaaggtcttcaaaatgtaggaaatgacttctgccaaagagaataatttgatgtatcttgaaaatagatcaaattagaaatgatgtatgagaacaggattatgaactaatggtcatctactgtgcctttcgcatttggactctaatatgctgacttgaaaggatgtgccttgctgttttgttttacttagtacataaacactaatccatattatcataagtaagtttatgactatataatagtcttcaagtcaaactggcaaactattaagaagtatatatatttctgattgtaattgattgaaatataaaatatacaaattatgttaatatagtgttattatttagcagcaatctaaatttgaaattcatattcgtggtgtagattataattcaaataatgtatgatagtcatcaaaatcgattttatatttgttctacagactcattttactagaagactatttgagtaatacagtagaaagtataggtgttctggtataaataaattcaagaggacatataaatcttgtcaataaatgggttgctttcactccctataattgtgttcgagggtacatctccatatttattttcttccatgcatttttctgctatgccactatctctacatgatataattttaactcgtatttcaaggaagatcttgactctgtccttggacctgggattctgtcaggtttcccctaatggttgcactcagttctttttctcttgagtaaatgaaggggtgacagagtgataaggccctttcgaatcaggttatctttagctgtatttggggattctttcatatttacaaatcatcaccaacatttctcaaaagaggtgaaagttattaccagcaagctgcccttggatgtttggtgacttgaaaacttgtaaagtacactccactccagacacccctcgcccctccccaccccccactcagctgcatatcactttgccctgcccttctctttctgaagttgaattttgactctccttgagtaaacatcataaatgtgttatggatcccctacagtcaggccttatggcctggagccctggaaacaaatggacagtgaagtgtctttaaaccttatactgtcctggaagagagacatatttagactttgatttagtgacaaaaactaacgaaagtagaatgtccaaagcgactggtctacaaaagaacaccttctcattcagaaccgaaaacaacaacaacaaaaaaagtgtttctaaaattgggtgttcaaagcggtatggttgtgctcttctttaccctcttcttttaatgcaaatggttgaaaataccgaactctgtcatgtggctaaggtgtgggtgaagctgagagaaagaaggaagtattttattaagatttcatccaatctactaagggtaattatttaactaacttcttccttttaattagatgaaagacagtccatcatactttgtctctcttctgtatatttgtacattgcatacaaggttcagatgaatgtggtctggagaaattcactccagaatgaatgcttttactaattgcttcctttgttcaatttaggggttttttgtttgtttgtttgtttgtttgtttgttttctttcaagaataactgatctttaagaaagcagagagttcatttagcaataaggtcatgtaattagctgctctgtgcagctaggtgacttgattaagtttatactgtctggtaaatcaatgcagcctgtgtggaggtgcatctcttgaagcatgtgcacttttgacctttacactagcatatgggtttttttggacgttccttaaatctctgttgaaaaaacttgagcactgagtagttgcaatgaaattttgtttttaagactactacagaaatttatgaactccagaagttagtgctcaaaacttaagctaaagtacacttctcaagaaaggaatgctactgtaaataacgaaataggataatcttgttagtacatacatcttgctatttccttccaagaagttctctctgactcacagagtgggcaaccagtagtctagtgcttaaggaaacaacatcattctctccctttttaaaaaccatttgctctgttctttgcctcagtgtctcaaggctgccttctcacataattgtaaagtaatccccagtagggtgttagttgatggcctcagggtgttaccaccaccaagggtatttgcattttaatggaaggctttaaaagaacttcaagcatctagtctgaaagtaataaatctctattggtggaatttgaagcaatgtgatagattgggcaggagatatctgcggtgaaaggagaccactgggtttattctaatcacagcatgagttaaagtgttcctacttagaggtagctcgacttttgcttccaagtgaaagttgtgaggacagctcctgtggcctggataatgaagtactccttagcagtttcattttctttaaaagcaaacaagtcaaagggctaaaagttcaaatctttgaattgccctttcctttcctattttctccattactgttctcaaatgaatacccctttctctgcgctttaggtgttcaggtagaattctcttcgtaccttctccaaattcaaaaaactttgtgtgtgtgtgtgttggggggggcatgcatgtttgagctctctctctctctctctctctctctctttctctctctctctctctctctctctctctctctctctctctctctctctctctcctgtctgtctgcctgtctttccttcttaattttcttggcttttgttcacttaaattgacaaggcattttacttgaggattcacagggcaagtggatttacaaatagatcaagatataaaaatgggagtagaatactaaaaacagattcacagagcctggaattaggattggaagggtgatagtagtgttctcattaactgtggactatcctcacacatcaacatgaagctggaaatggtgacacgggaagaatgattaggactcagctaggtagtatggaggggaggatgagctggggtagaaaagtaacagaggcagccttctcaaaaatggtgtaataagagacccaagccacccactgttcagatcaatatgatggaacagagtctgaaatcctagtatgcaggaggttttggtatgagtataacaaattcaaagctgtgctactgatacaaaatgtgatcttccttcaaaagaaaaagagaaagatttaaagagaaagaaagacaatcagtagaatccaatataaaacaaggcacagatgttggaataaaatagcaaaatttgaaaagaaggttaaggccaagcatcaccgtctatacttaagctatggattgtgaatccaataaggatgcaaatatattaacaaacatgtatattaggaaaaatctgaaataattttggagtactgtccatatttaagaccctagactggggttggaagtaggtttttgaagatgttgaaaagccataacagtgagttgaggaagaaataaagaaggatcagaaaaaaagaaaaaagaaaacaaaaagaaggatcagtaacaggagtaggatacagacaagaacataaaagatatcttcacagagataataattgagtatacaaaagaggaaaagatacatccaagttgtggacttttgactttgtcagtcaggtgccattatgctgaacaagtaaaagagaaatcagttttaatgggggcagatgctgagttcagatttggataagctgagtcttatattattataggacatctaagcagggatgtctgctagatgggcatcaatctgtctgcatcccagaggaagatctgggctgtagatgtatgtttagccattagtcctagcatcaaagtgatggcaatggaagagttcactcagggagaatggagtctatcagatgcctgtcgattgatcccaagcaaagcatcagttaaaaagccagaagaatcacaatgaagaataagaacaagtagctggagagatagatacatcatagcaacaagcaggagggtatccatattgatttacaagccagataaatttgcaaataagccccttgctctcattgcaaaggtctccagaatccaatgctagacattaagtctaggagactcaatctgtgtttttcttgctatttgaattgtgtcagttgattgaagcaatgctacacatcaataatttctatggttccacttcttttcatactatcggagaagtagattggaattttcttttaatgattccattggtatctttcattccagaagatggcaatcatatcacctagcctaggatcctttggtaaacagattacatctttgtaaaacacatagcacattacgatttgaatcaaaattatttacatacaagattcttccctccctctcgagaagaatataagctcctgaagatgaggagctcaccccctcccaatcaggatccagagtgccctgcattgaaaaaagcaggcacttaataagtaattttttcaataatcatatattacttacataaaataaaagagagggggattttgaatcttctgatgaggcaagggaccttagcggatgcaaacatggaaatgctcgaggatggttttattagatctaggcacatattggccaaataaataatggaagagcctatgaaaagcacattcataatacagaagcaaaaatgagaccataatgctaaatattcttatttgcttcaaagactgtattatttgcataatacagaagcaaaaatgagaccataatgctaaatattcttatttgcttcaaatactacattttggtgttattttcttacaaaaatgctgaatatttaactctgtatttgcttttgtgacaagaaattaatctttcctaatgggcacgtgaaggacaagaattgttaacaataagcatgctttaattttccctaaaggcaaatttcagatcctacataagaagtttctcgatgatgtcctacaaataattctaagcctttccaatttactcttgtatattaaaaggaggacaactttgtagggttgttcagttaaataaaataaggattaaatgataacttgacttatcttttaaatgacaaaaaaataaagaaattgcaagaccttttcacacattagagatgtgttgccatttatcatctagatatcaggctagcagtacgaagtaataaaacatatcatcgaaaaatgtgctataggtctgaatcattctttcattccacctcccagctaactgtagtattaaatcaaacaagcagaacatttccttaggcagccattgccttttaatttcctgaagaaccttaaaatatcattcattacaagtactacacatatttggtttttaaaagtctcataaatcaatagcaggctgactgtaataattattacaagttagtgcataattttcgtgctgaaggctgaatgcagaactttagcatatgcaaacgaggcaattcaaactgtgtatagatattaatatgaagaagcaggtaacgaggtgcaggctatgaattatgcatcaggagtggctgatcttcaatgaggaaaatgaattcagcatgtaatctaattagtgatggaagtctattacatctaactgcaaaagcaaccgtccttgaaacaaatttatttacagtccatgttaccacttgaaacaactttacaatgatgtgtcagacaacagcttaattgtaaaattttctgtttgtttgtttcagttccagacctggaaggcctcctaagaggactcaaagtgtcacttccccagagaactctcacatcatgccgcattctgtccctggcctcatgtctcctggaatcattccaccaacaggtaagagagtgattatttatgtcaaaaaatattaaatatacaccaacatcacatattttatacacattcatcatggaactgatatttacacgtttgggatttatttcataaacacgaagataatattctgatgagcgcttattctcaaaatgcatcacagttactcggatttcagttgtgaaataaaatgaaaggagcttatttgagcaaagtgctagaagttattttaaaccctcctcagaagttactagtcccagggttgtttgttccttgctcagggtcagtgacttttcaaggtcagtgctgagagttgtcaatgctaattcaaagcctgatgccatgtatgtgtgtgtgtgtgtgtgtgtgtgtgtgtgtgtgtgtgtgcgcgcgcacgcatgtgtgtgtgtgcacacatgagtgtagaatattaggtgtcaaattacaaacactttctgccccattcatttgacagtctttcacttaatcttgaactaagctggaggtccgcaagtcaactcatccttctttcccattatacccccaaatgttggagtaacaaacaggccctgctaaatgcaacctttgtgtgggtgttggatttatactcagggccaaaagcaagcactcccaatccactgaaccataatctcagctccaagtaactgaaattaacattgagattagaatgcttatgctagaataaaatttatgatagaaattttatgtagaaaacatatgcatatatatgcatatatatgcatatatatatatatatatatatatatatcaaacttgataactaaaaataacctagtagccagccaagtattgtctatgacatttctttagatcacttgcttctcagcatactgaatcctactgtccacaactctaatttcaaatttgacacttaagaaagaaactggtagtgtagtgaagcttggaccattcctatttagctcattcatcaaatatccttgtttcattcaccttttccttggtttgtggacaaattttcaagacaagtaattaacaggaaggctttgttccagcttagggtctcagtcatatctatggcctgacgtttctacctcagtttaactcagaatatcatggtgtaagggtagtagaaaagagttgcacatttcttgttggtgacctggaatcagagaaaccagagcctgcttgatttagccttcctgttcttctactaaatcctggcccaaagttcaggtacacatggtgctggatggtatggtacaacctgagaaaaaaattttcaggtgcagtgaacatagttcacattgttagttagttctagagatgcttcacagacaaggctcaattatactttcctcgcattgatatctctcagtccagtcaaggttcatacattagccacctcagagctcctttagaattgttgttgttgtcttagagactgtatggaacttttaactaacttttgtgtattgtgtagataatacactcaatgttgacaagataaagatctgagacgtttgacctaaataatttcacatggagtgttctatttaacattcttaataatattttttctgtattgggtaagtttatgttcattttcaaaagctacttaatcactgaatacaatttcctattgtagtcatttaaacattttcaagatttggttctgaagttgccttaatatttaaggcaagagtagtacacacttgatatcaattaaagtaatacttcattacatagcatcataaaataactcagcagttcatgaggttgctaaagaaaacaagtttgtgtgctacagccaacaaatcaaatattgcattaacttttaataagttttttcttcaaatgtatttcatattcctggatgaaaatagaattaggaagtagatccaacttgactcatcagtagtcattcgttttttagttggatcatttatatgtatttcagttgtgatggcatcttacctaggcatgccttttacttccttgggtttttgtgtgtgtgtgtgtgtgtgtgtgtgtgtgtgtgtgatgtattatgaagtcataaacccagattttattcaagattatcaagcattgaactgaataaggtggctataatgttttaagaagtgggtaaactggagcaggtggagattctagaatactttagtattctttatagccatgccaaaaggtgagaacagtttggcttcattgctataaccttattcatctactttcatcctttagatcagcgtcttaagatttacaccagcctgccaacgttgttctcgattagtgtttccttattgtagacaatttaattatctttcttacacattttttcctagtaaagatttagattttaccaaacatagaattctaatgtttcttttatttttaattttttgaaagatatggatagcatgtttctgacctcaatataattatcagagtaaaaacatagtagcttcaaggccaggtttggtggcacatgcctttaatcacaggactcgagaggcagaggcaggcagatttctgagttcgaggccagcctggtctacaaagtgagtgccaggacagcctgagctacacagagaaaccctgtctcggaaaaaaaaaaaaaaaaaaaaaaaaaaaaaaaaaaaaaacccaacccaaaccaaaccaaatcaaaacaaaacatagtagcttcaacatttcaacatgaatagactgattgaaactgccaagcttcaagtcctatggctcaagtggcagattattcatgaacctttattcttacttatatacctagaattaatgtttagcctttggaaacactaaattttgttttgcctggtccttgaaaataagatctattcattttgatgaatttataaatatgtaaaattgttttatggatttgtttctggtcactcagctatttttactttcaatgactgattattagaaagtaaaaggaaatgttttctcacaagaaaattatattaatatgcataattaaatacacacacatatgaggcaaacataccaaacacaaaattacaaacctatgacagtgtatgtcatatttttattgctgtggtttgcttgagtagggttttgtgtaaccttaggagaggacatgggtaggtggtcataatttcccaacattttggttgccacagatgccatagcaacttgaagttgaagttaatgaaaagaaaaagcctttttgtaaaatctcccaaggcagcaaacctcctgccgtggtcactacatttatcctgacagagcattgccatcaatcatttttgaaatatgcaccatttagaaataaattcattctagcaacagagctccaatagtgttcaggagttttgtgttttgtttttataaaatcatgtctactatgcaattaaggaaaggatatttaggaatttagaatatgcctttccttgtgccagaagtgcaatttggatagtatctatggccaacatcctgatttcatgtttaggtcaaaatacaagctcctgttgaaatataatttctgtgtcagtattcagtgttggtatatgaatatccaatacttgcatttggattcaaaggaaagactattcaaaaatctacttttttttttaaatgaaatgtttgcttcttggacatttcctttttctcaccatgacttagtgttgatggcaaatccatttgaaatgtccatatgttaagcacagcaaaacaatttcaaacaaacacattccccatggattgatgacacaaaaacctaattttgaggtttgtttttctttatttctttcttttctaggtgataataatgatgagcaaaaacacctaaactgccccttaagaaaatttacatctgtattattttaaggacttttaagattttcattttatcttctgaaaagattaaaactttccctctatgttgataaagataacataataagtatattaagtgtgctctttggcaagtcacaatttgagtgccttgctcaaaagtaaattattcttttccctccctcnnnnnnnnnnnnnnnnnnnnnnnnnnnnnnnnnnnnnnnnnnnnnnnnnnnnnnnnnnnnnnnnnnnnnnnnnnnnnnnnnnnnnnnnnnnnnnnnnnnnnnnnnnnnnnnnnnnnnnnnnnnnnnnnnnnnnnnnnnnnnnnnnnnnnnnnnnnnnnnnnnnnnnnnnnnnnnnnnnnnnnnnnnnnnnnnnnnnnnnnnnnnnnnnnnnnnnnnnnnnnnnnnnnnnnnnnnnnnnnnnnnnnnnnnnnnnnnnnnnnnnnnnnnnnnnnnnnnnnnnnnnnnnnnnnnnnnnnnnnnnnnnnnnnnnnnnnnnnnnnnnnnnnnnnnnnnnnnnnnnnnnnnnnnnnnnnnnnnnnnnnnnnnnnnnnnnnnnnnnnnnnnnnnnnnnnnnnnnnnnnnnnnnnnnnnnnnnnnnnnnnnnnnnnnntctccttctctccctttccccatcctgactcctttggatttaaaatgtctgtccactcttctcttgtgaggaacctgtggacaatctctccagctcagcatcttgaacaacaacatgcacaaaaatattctagcatataaatagtattttcagagtcccagaacataacttaagggactgctgtcagtttaccacacccagcaagtacctcaggatgagaattgtgagaagtcaattacagtgtctcagatgtacacattaaatgtacacagaaagattctggctagttttgttcgctgaagtatccctagatggagaatattgcctggcatggggcaggaactcaaaataaatatttgttcagtgaatatagctaataagtgtttagtgaaggatttctgagatgaattattatgcctcacagttacaaactgagccagttttgtgttaatacagtttttaaactcccactatatacacataggctttatattaaatatttagagtttagagtacaaacatatacatatttggtatacaaaatacataaaaggaaatatttctttttttattcattggttttgatggctacatacaagcactaacataaacaactgatgaatgttatatatatatatatatatatatatatatatatatatatatatatatatatatatataaagcagcaagtctgctatgcttacgtttgaacttccagtagacttgataggacataaattccacaaaacaatacaaacagcctgaggtgttaggctttcctctatatcctttcccttcggagatgagcttcaaagcctcagatccttcccttaataatttgctctacactggttgtgttaattaaaccaatgtatatatatatatatatatatatatatatatttgtgtttgctacagaaataacattagactttataattactgtttatatgtgactataagtatattttcactatattagataatctaaagggatgataactttcattggatccacagtgtcctgatttagaactaatttattgcacacttaaataaatttaagttacaatttaattaaatataaatacagtttgtgatttaaggaacaatataaatatatttgccattttatgcccttccaacttgattttcttgagttcaatctctcattggtctggaattcatcaagtaacctaggctgaatggctgcaaaacccagagatatgcctgcctcgaccttcccggtgtttgtatgataactgagtgtcattgtgcccagacttgtaaattgggttctgaggatctaatccttaggcttgctcaggtagctcttgactatgtcttcatttctgaatttttaaaatatgtaatacccataattgagtactatagccaaatcacaatatagtctgactctgttcctagcagagaaattcataaaatattttctcagtttcagagactgttagattcagatttaattaaattaccacatattatacatgttactagattctggacaggctacccttttatataaacgagaagatagttatagtcctttattctctaactggtttttctcttccaagtttttattcagctctgtacctcggttgcctacactaaaaatcattatctgattatgcttctttctcagtatactcatatcactgaagcctttaatttgactaattcttatcaatatttgcttcctttttggtatcacaacgtgcctactgataaaggaaatgtattgacatccagaaaacaatcctgcagatttagttcagatgcagaccattcgcctagcactgccaagccctgtgctcaattcccaacactgaaagtaaaagaaaatggggctggttctatatctcagtgggataaagtgtttactggcaagattgaatacctgagttgatctttgaacctgcatattggaaggaaagaagcttctacctgcaaacatacatctatgcacatgtatccacacagacccacgcagtaaggaaatgtaacaaaagtgaaacaaatgtaattcttttgtcacatttgctatgggtggatgtcgtatagataactggatatttgtagactattgatcttttgtttagagtttttagtgtgcagacccatttctcgtgcagtagttaacacattgtcattattggtcactataatattgttgacaaggtgctgtcacaatcctgattccctttgtaaatgagcaaagaagaaaatgtaagtaactgtatttagaaaaagcagcaagtctgctatgcttacatttgaacttccagtagacttgataggacacaaattccataaaacaatacaaacagcctgaggtgttaggctttcctctacatcctttcccttcggagatgagcttcaaagcctcagatccttcccttaataatttgctctacactggttgtgttaattaaaccaaaccaagtaagaactactttttagcttctccttattttctaaggaagtttctaggttttagctgtcatttgataggaggtaggagcactattttttattagatattttcttcatttacatttcaaatggtatcccataagtcccctattatactggggcatataggcaagaccaagggcctctcctaccactgatggcctactaggccatcctctgcatcctccgctacatatacatctagagacacaagctctgggtggtactagttagttcatattgttcctcctatagggttgcagaccactttagctccttgggtattttctctagctccttcattgtgggctctgtgttccttccaatacatgactgtgagcatccacttctgtatttgccaggcactggcatagcctcacaagacacagctatatcagggtcctgttagcaaaatcttgctggcatatgcagtagtgtcttggtttggtggttgtttatgggatggattccagggtgggacagtctctggatgctacttccttccatttcatctccgaactttgtctctgtaactacttccatgggcattttgttccccaatcagagaaggaacaaagtatccacactttagtctttcttcttcttgagtttcatgtgtcttgcaaattgtatcttgggtattctaagtttctgggctaatatccacttatcagtggatgtacattatgggtgttcttttgtgattggattacctcactcaggatgatagcttccagatccatctatttgcctaagaatttcatgaattctttgtttttaatagctgtgtagtactccattgtataaatgtaccatattttctgtatccattcctctgttgagggacatctgggttctttccagcttctgactattatacataaggctgctatgaacatagtggagcatgcgttcttattacaagttggaacatcttctgtgtatagatgaccaggagaggtattgctggatctttcagtagtactatgtccaattttctgagaaaccaccagactgatttccagagtggttgtaccagcttgcaatttcaccagcaatggaggagtgctactcttttggtaggagcactattgacaggactgatattacgcaaatttttagaaattgaacaaaggcagaaagattagtgtcttaataagtatttgcattacatttttgtgagcaaattgatttttgctctactaatgaataaatttgactttacttagaaacactccatgttaaaaaatattgagatgtttcattgtatctgtaatcataggtatcattattcttgaagaactgtagaaaatgataatttaatactgagtgaacagggaaatgatatttatgtaaagagaaacatcagtacagtattactcaacacttcaagtaacatttggcatatgaaaatgatttaagctactgacctattgttggacactaagggaaccatctagatgatatgagtttagaaatgataatttttagtgttaagaaaacatatagtgaatgatagattagagccacagtgctctgaggatacacattcaatcaatagattgaagtaacattctaccaaactaccaagaggtctattggtttccataagagcctacctattttgctcacagttcagggaccatttgcaacacaaataaagttcaaataagcatagaccatttctctgaatacaatgtttgacaataaaaatgtggctttatgttccgacagaaatgttaagaagctagagggtaggtcttttatcgtaggttttatatatattttataaaccatcttacatactattaaaaggcagtattgaaacctattcaagcaagcaaaacaaagcaaaaataaataaaaaagaacaacaataaacaggtcctcttttctgatcatcagccatccaattcaactctgatcacatttgttagggaaatatgaactttctagtttattaagggagaggttaggttgaaaagtattagtttgtaaagtgtttgctatccactcaggaaacccagagctcagtcctcagccctctgtaaagcagacattctgtgggcctataaatttaataatggataggtggagtcaggagaatacagtagaggatgtacatttccagacattaaattacttcttactaattctatataaatatctaaacttcatatatatataaacttttagattttacagacttttgacaggaacactttatgttttttaaagcaatcatatttcttcttgctgcactacatttatacatggtatatttagctcgtttgtaaaattgtaactatgaaatctaataacaccctcttttcccagtcaatgtcttttcttctgttctccatgaccttcatgggtcctcttgaatgagcccacgggggtgaaagtcatgctaagagaaagtataacctttggcttaacatggagaaatatacacataaaaggatttaaatgaaataatttggacttcactaaaaaatgattttgagatcaatttcaattataagaatcaagttccaagagaagtcaatatctgaaaatcataagaacctttcattctaccacttatgaaatgtatactgattgaactattggcctattcagattttttctttcataggtaaataacattgttttcaaatattcagtcattttctcatattgtcatgtcaaatgataatctctagcaaaattttgcaaaagaaactaactcaggagaaaagtgctgaataaaacaaacagatctcagtattatatattattacagttgactttcaatcatcttcaagctaatctatttgatctaaaaataaaaatgatatcatttcagaatgtacagctttgtcctaaaatgtcttagttcaacaagttgttcatagtcatgaaaatgcaatagaagataaccccaacagaggtaagagcgagttttggttattgtatactttctcagtgacactgattaattacatagacttgcctttgtaggtaaagtacctttatggatatgaaatatccttttatataccgctttaaaactttatacatcgcaaatgatggtacttcttaagagtgtagattgctttcatctgattaaattgagtgttgaactctttaattggcgaaaatgaactgacttactgtataataaacagtgaaacaggtttgcaaaatgataaaactgcaatctaatttcagtaagttcaattgtgttacacaaacatgtggccaacactatacacagggctgactatttgatttgtgtgtgtgtgtgtgtgtgtgtgtgtgtgtgtgtgtgtgtgtgcgcgcgcgctatttcacattttgatttcagctccaagcagtcctgttcccagatattgccatgggcatttagttcttttcttacatctagaatacaattagtagcttatgactcatgccttcaaatgacattatttttttcaagctaggtggtattgtgacacagatcctaacctggaaccaaaaaggcttggcaaggctttttcttccttgttacttcacagctaagtgaccttgaacaatgttggctttgcttagtcctctcgggcaagaactggacccagcacatcattttagaaaccctcagcattgtacacatttcattagtatgaattttgtttgtacttgtcaaaacaggttttttaacttcgaatttcctgcatcaagctgccttcccctaacccactgccttaattaacaatcatcacacaacctgacacagcttctacttgatagaactttgtgaagaagaaaaacaggttatgtatcctaatccattttgcttagcattccgtagtgagatgttgaattttctagtgatgagctttggaacagttagtgttttgtgttccagctgagcaggggctgctgctctctggacatgttatatctaagacagtggatccatccttatgtctgcgatatcagtttatgagcaactgaatttcatctctttgtaactttgtttggaatcatgcaactagctaagctcacatattttcttcctgagataactctcttctcatggcagttgttccttttggatcattattatagaattttatgattcatgtttatgattcgcattcaattctcagagctgtaccccacttttaatgccctggtaaagtaacaccatattgagttaaaacatttccatgaggttgttatcttttttaaaaagttcaataattttgaaggaaattgatttttctaaatatactttttctcattacctgaattcttcattcctgacaatttggggacaagattgtaaacacagtattgtggtaggattaaaagagataccacattgcttattctaaaaatctatacatatactctgttttccccaggtggacataatgattccattttatcaagatagttttgaaatatttatatcaataccaataaaattgtttttctctaataaagtacttttttagaccagtttatgaagctgctattcttctattaaaacatctatctgatgaatgtgaatagagtaagatctttcaaatctatttcagtgtttcattcttatgtcttttgcaatttctactactttattattttcataaacaaaatccctagagattttaatgtggagtgaccattttaagaattgcatgaagacatgttgattcaaatgaacacatatctaagcaactctaaattccaatatattgctctcttaataaaataatttaatgctattttgatttatttgagaatgaaattcatttcatcatcgctactctctaggttacatattgaaaaaattaaatttaaagataccattccaagaagaaccactaccatatgacctgtccatatgagttgtcttcttgatttataatagcaattgctttctcagcatggatctcatgacataataatattctatgaatttttgaaattatactgagctccacatcagtcatccatagtagattagtatctgtattagtgagagggcttagtcaaagtaagactttttagaaatatgtagctttccaaaattgaaatatggttatcttagagagagtagtatgttgcttcctctgaaatcttttgaattgatcacagaaatgctcaaaaaatctcattgacataccattaaaatacttcaacatgccctgtccactcttgttcctggcccaaattcaagaaagtctattttcctgtggtttctaaaattaatctcttaaatttcaggaacaaaacggtacacaggaatatgaatatttgccacacttattttatctatattcatcaaggagtaataatgtagaaccttaagtgtaaagaatatgctgtttattttgaattgtatgatatctttccaggaagtattttaacctgttataaagaataaaataagacactctaaagttgcataatgtattcaagttgaaccacatgcttttttattagcagcatgcatgggaggaaggaacttttaatattgcaacaattcttattacatattaaaaatttagaatatctttgtatgtaaaaatgctaaagagatttccccaacaattacttgtatttatataaatttatttagttttgttgctaaaatcctttgctagcttgtgtgcttcttttttcctgaactcacaagaagcaaagctttcaaagaacagttttgaaacaactgtttaaacttgcagagattatacatcattccatgaaaaaaagccagagtcacactgcagaatcacgaaacacaaatacatttttacaagtgaaaatactcgatatttgctttaaagtatatttgagtttaagtatatattactcctcatatatctttcatatacctactataaaaattattatctatacttcctaagacatggattatggtatgataaaagaagaaaactgtttgaaaaagtcatctacttttaccaatcctgtccacattgttcactactatatcttccatttccaccagagactgcagtaaaaatattgctaaataaacagaatttaattagtcgtttagcaagttagtcaaagtattgggggaaaaatatttgttgaatgtttagtacattgtaggatttctgtacacagctgtacacagctctgtacatcatttatactatatgacatctatccaggaagtatttaactctatgataaagaataaaataacatactctaaagttacatagtgtattcatattgagtcccatttgggctcagaactttagtgttactccttcctactcggtactactgctgctcctttcaagaactgaaaggaagatttttctttaaaaagcacactaaaatttcatagaatagttaagttatcattggtatgtttaaccttaatgctaaaattgttagctttactcatattgtaggggtagcttaaattatttctgttacagacacgctactcaccaacagacctaattttccccagataattaggtatttcatgttaagttttatagaaatattaaggactgatttacaatagtcttatagagtataaatttcagccccagattttgagagttaataagtgggtaacaaaaggataggagaaattttaaaatttattcttctggcctgtggttgcacaacagtgcaaaatcatctgcctcatgtgtatgcagcccatggtacaatgctagtacaagagataggtaggcatgcatatatatgtatttcataattcataactatgttgagatccttagtgtgccattattttgaactctatgtctaacttgctaccacttactgagcatataagggtagtctgactttcacatttagctttgcaaaattatatagtgctaagtgaatgatacatatttagtactaatgaagttatttctgaaacttataaatgcctacacacaaaaatcgtgttttttaagttttagtcatctaacttgaaatgtttattaaagtctcaactttccatgatcagccagtgtcaaggatggtgttcatttacccattagtagagaatctattattatttcttagcacacttgaaatactatctggcaggaacattgtaagagatggcactccagggtatttcagtgtgtatgttaccaataataccaataatattgtactctgatatataaaacaataaagaattgaagtgtttttgctaaatagataatctatatttcaaaatatttactgttgagtagttatatattttggagaactattaatgctcctacattatatagtataagttttttttgtttgctaataaaggatatatatcaggatcttctccactctttcaaatggcataaatgcataacacaagaatatgctgtggccatcacttcaacattttagataaaaaatgatgagctcccaattgtctccttagtatttttccttttgcagcatgtctacagtaaaaatatttaatttcttttatttttcaaatcaagattttactaaagagaaaatagaaattctccagttttctgaagaaaagaatacatgtttttgaaattttcgaaaagttctgtctgaatagaagattgaactgatagccttttatttggtatcgaatctcaaagtccaaacgagagatttgaatattaggaccttgacttgactcacctctgtttaattttgacagttgtcttaaagtgaatttagtgtttaatgaaattttctggactgataactcaaaacctgaagggaacaattctagtggtgagaaagtaattttctggcctaattacacctttggcctcaccacaaagtctgtcaacaagaatgccaggtttgatcatgattttttttgacgggagctcaccaatctacatttcacaggagagtgttttacagtggcacttgctatttgcaactatgattttataactgggaatcaaacctcaacacactaaaatttagtgaatgaactaaatattttctcaattagaaacaccatatattgactttaatgaaccataacataccttagttcctattctagaaagctgtatggatgagataactatttaaattctgtcaggtaatatcaaataaattatgaatacttttttttaaatacagaaaatggtggacttctatagtatttttcttacttttccctttctacccctttcttattcttattcatttgtttatatattcatttttgacggtggtgctctcaatacaatacaccccataggactccaagcgctggtctattgttgcaccaccgagtcacacatcacccctaccacaccattacttatttaccttacctctgaaagtctaacaattacagagactctagcaggaatctatagaactgatctctttcataagtgtgtctttgcttaacctccaccatcgaatatatccagatacaggtaactgcctcaaatttctgagccgagtgttactgtgtatcagtgtcaacgaaaatctatagcggtttgattagttgtcaacctttgaatcttttctccagtggttcgaccagaaatcatgatctgctatagaaagaattccaggtcctagaatacagtattcactaccttctctgcctacttttcgtgttttcgtcttgttttcatgagtcatgttactgtatttaaaacatgaagaatgccaattaaaactatgtgacatataaactgtggtctacttggagtaataaaataataaaataactgagcaataccattgtcttatttcctcatgatcatgatttctggatctacatttgataaatgttttcctcagctatatatatttagctgaggaaaaaatttatatatatgtatgtatatatccacatagtcacacatactaaaatttctaaataagttaggaatttatctgtaattaatctgaaacaaatatgtgttatatttatattagcaaaatatactcactattacttccaggaacctgtgaagtatatacgtagaagtcatgactcttttttataaacatttatcctgagttacaaggatcaatgacattgcctcccgaaaacccataattataggtctcttggcatggcaggagacatgtgcaaaagaactgatgtcttctaaaagcaccaacaaatgctaagggaatgatcttaaccatcgtgatagaaaatggtatatttaaactgtcttatatcagcatgatctccataacaattatgtgtgtcacaaacataagccaagtaaatatgataatttctgtggaaaatattataaatcattttatattgtaggggagtataaaggctatcccttgttgattcatgttgtatttgggtcattatagcatcagtaactgatattatatattataattttcttagatttaacttattaaatcccttttcacatactagcttacttaaactatatttcaagcatatctcataaaccattgtatagaaaacatgatgattttcagaacctgactatattggttcgatggtgatctcatataaataaaagtataaaccaattcctggagagttttaacaacagtatttgctgtgttccacctaaataagacttcaacatctgggaagaaggtcagagtgtactttgccaatgtggcaactcacttaagtccatttttgtgttcatcagcaatggtgatgctaatgagatttacttattgtgctgttttggcaacagcctggcctggttacaacagaaccatagaatcatgtctttttatagttcctatgtcttgataggtttggtagaaaacaattcgttcagatctgataatgaaaattggcagtcatttcatgaagattagtttaaggaaatgaggccttttagaggaaaatctggtgctctggtgggccagacatccatttcatgtttaacagaagtctagaataattctctgttcatctggaaggcagaactggacaaatgtgttatataaaagctgtatgggaggatggagagagctctagctatcagtccatctgcagactttggcaaactcatctaaacaaagtatcttgattgttactttcaagtgtgtagcacagagagtttttatatttaagaaaaatactgcaattattctgataacccctgaatttaaaattcattaaaagccagaccttgaagttcatgcctgcagtctaaggatttacatacagaggcaggaggcttaagagttggaggcaagtatgaacaagtatcaaaaaaaaaaaaaaaaaaaaccagacagaaaaaactcaccaactaaccaacaaacaataaacaaaacccagaacaacagcaacaaaaaaccctagaaatatacaaaagatccactagtgtccctcaaatagaaacacacaagtataattccatttcatagtttactttgaataaacactctaggaaatttatgtttacatctggccaaatattgctgcactaaaatttctgaactggttgtttgaaactgaaatttatggacttaactacacattaaaatgtactaatttgtctaattacaaatacaaaattttctttattgattatgagtcataaattatttttatttggtaagaaatgctataatcttttggattataatttacgtgatgactattcatctttgctgatactagttagggatgcaacaggtccatgtgacctaatctaatcccaaaatctaattcattgttatttctttcatataatatatatttattttaatatttttaataagatgtgttaagggaaatgaaaaaaacaaaaacaactgccccccccccaaaaaaaacccaacaggcttcctgcactactgcccgcaactctctaccccagctgcatctgcctctaaactagccgtggcagcaatcgatcacattctccccagctctggtttgcttgtctcatagcagcctgtaccttctcatctgtaaagccctgtggtttgaggtcccatgttacagtatcccagtaaagcaaaactctagaagcttataatcaaacagtcagatttatatttcaataaattctcaattcacaaggtgcccatccaataaattcagggccagttgataatggtacaagctgcctacccagattagacaagttaccccaagtattctaactctatttggtaacatatctacctgtggctatttaaagccacaccagttctgaatcatactgtccatcaccctccatcttggctctatcctcccctctcccaagactctctttctctctctctctctctctctctctctctctctctctctctctctctctctctctctctctccctctctctctctctctctctctctctctctctcacacacacacacacacacacacgacttttagctctgcctcccttttccttgtcacaggcctcctgctgcactagtattttaatgtaattgtacagggaaaattctgccacatattaccttttctgtttaaataaatacaaacaaacaaacttttctcttaaaatgtaaatataacacaactattaccattttgtaatttataagatatgagatagacctaacactcagtccatcagtttttgtcattaagatagaacaacgtcatctgtcctaactaaaagggttataattctacacttaacttagttcctggctttagataggatgccctctgaaaaccatcctctcaaatctgttctctcaatgtagatagcctgggttggctttgagactgtaattcttcaacaccttcagaaatctgagaatgaccaacattaactgaaaatatataggaagcttagtacaacttccagaacaagttgtagagacagctgcctacccacacagctctggtaagtcaggaagttggagcctgtcttcagccttctgacccaggatcatctcacagacctttgaaaaacaggagttattaaggaccagtctattctgtctcagaagaactaagctgttttaacatggaaattgtgtccttttctggagagtattttgtctgtagatgaaatgagacaattcttgcctagtagctgtctcaccaaggatggttttttttttgagagtttaagaacctaaagctaataataactacaattgctaaaacaacataatatataagaataaaacttaacacacccatttttcagatttcctaacttttatttcaacagctagatattacatcatctaatttgacaatgactcggtgtggtgctctatgaaaacttaagttactcgtgaggaaactaggcctgaaaactgcagtttacatttaactttaaagtggcagaatgacccctggaatctattgctgcttactactagacacattgaacaaatcctgtcccatattcccaatacttttaaagaaaagtcatttcctgtcccgtaatcccaatacatttgtttacattatttttaatgaaaatggaatacttttatattgttgttaaactcctattcacattcttccccacaaattattaaaaggttaaagttcaaaatatataaaagaaatttgtatgccagatctgaatgtcatcaagctatatgttaaattcttgtatataattatggtcctaaaaatattaagcaggtgactggattaaatataagtcaggcataaaatgccctacatgtagctacatagtgaatcaagtaaatgatcaaacagaaatgctcattttgtgccctgggcaattttggctgccagcacttatacatcaaaacttcactcaatgtaagattgattttattttttgtttgtttttaattccctacagcaagcaaggttagttttgctgtatgccggctgcatcattaggttttcaggaaattacagttgcttcagatatggttgaccaaaatattattttctccttttagaccataaaatattggttgtggggtgagtactagtgagataaaattatcaaataccagtgactccaatgcaggcagagtgacccaccccctgaccccacggagaaatcgttgttatgagaaaccagaaaatctgaaaaggaactctgcttaatcagacaaccaggggctgcaaaatatacttagtaattcataggagactgtcatgcaaaggttctgatttctagtcttaatacaggattgaattcctatgtaagttgccatattacttctttccacagttgtttattattctgccttaaaacatgtcaaaaaaacccaaataaaaacaaaaacaaaaacaaagcaaaacaaaaattcccaacagatgaacctaaaaggaatgtcagctctgtggttatgtaaatggaattgagtgctttacagcaggtttaagatttttataactcagaagttgttaacagccagctggtttgtatctgctttttatggttattcttgtcatatgcagcctccacaatttttaattatgttttatggtatatgttttcctcctccagaatccctcagccactcttggctttactaggtatctcccactgggaagggcatagctacaagggtgagactctaccctggaaatacagggtttgagtccttgtctcaatggctctattgtggaaaattcaagtaactttccattgcaaatgcataaccttctgttaaaacattaaacttgcattaatgtaacaatatgtgcaagttactacaaccagcttccagtaatgtaaaatagttgatatgtaatattttaatttctttcttttttcctgttataaatcatattcacccttctttcttctttttctacttccctcacattccattcttacctccctctgtccctccctcccttcctctctcctccctccctctctccctgtctctccttgtctccttccttctctttttcttccttctttcctttcttccttccctgacactttattttcatttaatttttaattttgatatgaattttatctcatagttaagttctaaatgaatgttttattacctgattttattatagggaaatatgatagtaaacttttcttggacttttttttttttggtacttaaaattttgttgtaaatatgcaggtttttagtcataaggaaaatagagtaccgaaatgtgtttggagtctgaaaaaagtttttgtttttaatctatactttaattatttttttttttttttttacagtctagactttatccccctcctggtccaccctctaactgttccacctcaccacatctctcctcccccattctccaagaggatgatgtccccatctcctactccaccagacctccccactccctggggcctcaagtctctcaagtgttaggtgcctcttcactggctgagtccagaccttgaagtcgtctgctgtatatgtgttgggggcctcttatcagctggtgtatactgcccagtttgctcagtgtctgagagatccctagggtccaggttaattgagactgttggtcctcctacatgattgcccttctcagcttctttcagccttccctaactcaaccacaggggtcagcagcttctgtccattggctgggtgcaaatatcttcatctgactctttcagctgcttgttgggccttttgaagggcaatcaagataggtcactttttgtgagcgctccatagcattggttagtgtcagaccttggggcctcctcctgagctggatccccatttatgcctatcactggacctccttttcctcaggctcgtcttcacttttgtccctacagttttttcagacaggaacaattttggttccgagtttttgactgtgggatggcaacccaatccctcacttgatgccctgtctttatgctggaggtgagttctacacgttccctctccccactgaagggcatttcatctaaggtccttccctttaagtcctgtgagtctctcacctccaaggtctctggaggtctctggtacattctagagggtcctcccacctcctacctcccgaagttgcctgcttcaattctttctgctggccttcagggcttcactcctgttcgccccacccaatacctgatcatgttgtccccttcacctccctctctcctttcctacccaggtctctctctctccctccctcctcctgtgattgctttcttctccctcccaagtgagattgaaaaaagtttttttttatcaaagttagaatatgtacaattattgaagattagagtatgtgtatgatccacctaaatatttgtagaaattaagtctttggaacttcttactttatgttacttcattataatatgaaatatgccagcaggctatgttcctcatatcacatgattttcaatatttagaacacaatggtgagtgcttagatttgtaaatgttgaacgtgtagccgttgctatttgtattttggacatgatggaaatatttaaccaagaacagaaacaagtgacgaaggtgtgatatgcattgcacagatgttatgtgcactctacttaggttccaagtcacttttcatagcaaatagcttatgcttaaggtgcaataggaataacaattatttacgaaatctggtctttatcattctcattctgtagatcaattggtctaaagcaatattatgcttttgtatgtgtagcatatttaacactccagatttaagactagaaatatttattttgacttattgtctactatccctttagtgttaggatatttaccgcacctttatctctttggccctttaggactagttatcacaatatattactgttggctttgcctggagttattaaaattcaccagcaggctttagaaactgaagcaagctcataagacagatgtagatgctaattcttatgagatttagtgcacataaaacatttcatgcaggatctgtgcaaatatgtgtgtcagaaatcaagataaacccaagaaaaaatgtgaaaaaaaagaggtggaaagtgttggaaagatatgaaagctgataatatatgagcggcacaagcaggcagactgggttcagtggccagaacccagagaatctggacataccagcacacagctataattccagtggcaaggaagcagagacaaggggactccaggtgcttgttgccaatccaggcgagagtgatcaccaagcttctgcttcagtggaagaacttgtctcatttaagaaagaggagtgaagaaggaagacactagatatcaacctcttgactctaagtaaacccaagtacacacagagacacagaatttctaattcgtccatattagagtttgaatgacaatttgtataaatacttaacatgtataattcaaaaatataatatttggtagggagaaataaaggatggaaaaaaaacagtttagataaaagtatcaacaaaacagcttcacatttaggagaaaataaacctcagaaaatttagattataggtaagaccagagggcctagaaacataatttggttaatttctcatgcttaaagtgttatatatcctcaaatcgaagtgttagtcagatgcatgtttgttaggttgaataaaatttatacagtagtggtcaagttggtgaaaatgaagctgtcagatttgctctaaccctaatagttgacattatacagacattagagtatagcataaggatgaatacagagagaatgcagaacaaaaccagacaatctcatctgatccccatctattgtcccattgtggccaaatataaaaagatatggagccagcatgtatgagtggagagtggcctttgtgaattttcaaacaaaggatagcaccttgaattctgaatattgtaccctgaagaacacaccagggacaatctttgaaatatgtctctaaagtgtcaaggtctctacattattattgaccagtgaaaattttatgtttttgctttttttttctttatatggttcattaaaactgtgactcatccagaattatctttttaagctttgtctcttcgggtggattcacttagtctacagtgaccttccattaacagatttttttgagaatgtgaatgaaattcagaaaccaacaatttaaggtaaacgaaagatagaaaggaaattaatagtcttattaaggacagttgttcttcagaacactaagaaacttgaacgacacttttaggatcacattgcttttctgagtgccatttagaccaaggaagaacatcaacctgtttgaccttcctgtggtgcttatgggctgcttacttgatgttatacatgtggaatcaggatcttaatggaggacaaatctccttcgtggggcaactaaagaaaagtagatgcaaactgacacaatgtggacatcagtgcttagggactttccgaggatttcatgagcaccttgaagccaccagggaaggcttctcagaattcatcctcttgcttcccactgtttcaaggaagcaatctagagaattttaacagttgtacctttaacatttctttaacgttgagtaagctatggtggaggtcacattccacgcacacacacacaatcgatgctgacatatggatccaggaagaatcagatgtctgcacacaatggcaacgtaagagcctttctttaacaggagataagcctccgtttcctctcagcctgctgtccttcattcttcacttagctctctgtcaaataaatattttatcatttcatatcttttcagaatgattgttgtttttctgaatcatctatctatctatctatctatctatctatctatctatctatctatctatctatctatctatcatctatctattcatctatctcagctgtcattttgtgatagaatattatcataccagacttaaaacttgtggtgaatttcacatttgtaaagtgttattgtttcaaaatttccgaattctcagcacattttagcactggcatatgataattaccctgtggtttagttcaccgagacttgtgtaaactttgagaataaacttgtcgcatttggattctgatccttctttcattagttacacagttttaggttgttagttatatttgtatacaacactgtcttcttctagagatatgcacatgtacagtctcagacccagtcagatcactgatgcaagtggcataattattaacatacctctttctatacttttagtgggaagcatacattaaaaaaacctgtgtttctatcctttgcctttgtttttgtatataatagggccatgaaagatgtactctcagcaagttttaagtattcaacacagacctgtaagctataactacagtgactttttatgtgtcttcccaaatctcaaagtaatctgtttgctaaagaacttttaaataatgctaacagaataacatctgtagtaaatattttagaaatgtttgcttttcaagtaaacatttgatatgtataggctgataaataggaagtgtgtgtatacagacattcaaacagaggtttttttgttacaactttaatgtttttgtattttgagcacaagaggacacaagagtactgtgaggagcaattataacagtcttcttggtataacatcagtaggtgtgggatgctgacattagcacaggtataagtctctggctatctgtgtatgcaaagtgcaaaagctttctgagaagaaagaaggtgacaacttagtaaaatgtcctagcaatggaaccctagcagttatactcccctctggctgggtctctcttctgtcagtttactttaggacctttgtaaatacttcgcattcattttagaacttgcagacgcaaatgggttcaagaaagagttagtgttcctttacactctttcaaatttactgcctctttttccttaaatacttgttgcatgcatgcacatacatacacacatacaggcacacatgcatatatgtgtatttctagatatatgtaaatatagcctgctcagtctgtatgatgttgctagtatgtatgtgtttcacgaatgatcattggcattgatagccagtcggtgtgcttttccctggagaagacaatttctcctgctcttagcatcccgtagtttcttgtagttctgtgtgggcttcaagccttctccgttctacatgagcatgtctattgatatggttcttgttcatatcgtgttctttcattattctttcttttatttcctttttttttcaatcccctcctggcccaccctctgactcttccacatcccatacctcctccctgcctccctgtctccaggaggatactccctcccccagacctctaagctccctggggtctccagtctcttgaggcttaggtgcatcttctctgactgaacccagacttggcagtcctctgctgtagatgtgctggcagcctcatatcagtgggtatatgctgcctggttggtgggccagtgatggagatccctggggtccaggttagttgagactgctggccttcctacagggttgctctcctcctcagcttcttccagcttttccctaattcagtcacaggggtcagcagcttctgttcattggttgggtgcaaatatctgcatgtggtccctttttgtgggcactcctttgcctcagtaatagtgtccgtttctgtcatgtagctcttgacatttcaaggacaaactgagataaacttcctgatctctagcttttacaaccttccatctccttctttagcactgattcctgagtcatgacttcaagggttgtatactagatgtgtcaactgggactaggttcaacaactaggtcgtttgattggttgttattctctgtaatggcgtctatctcttgcaaacagaggctttcttgatgagatatgagcactactctttcctgtaggtttgagaacaaatgttcggaatgtacttagcaattatgttggcttagtaaagtggtggttgctggttctcctccaaaacctgtgacttcactatccctaagttattggttaggattacagtaccaggcatgatttttccttttgttctacaaggtttaaatccaaataagagtgttgttggttgctgtcaaggtatgcacttcactactgcacatttaagttctttgtgccatactgttctttgttgtggtacataggcatcttaattgtttatttccatcatttggaaattcgaatttgcatcttctggatgcatgaatgctagtcctgaggggtgaagctttcagatcagatctatttctgtcacctctggacccttagtcagaatggtatgatattgatatttccagtaatcaggactttacttctaactctagtgggatttcgtacgcctgttgttgaggttttttttcttatggtatatggtttgtgggagaaatatcaaaccaaattgaaaaaaaatatttaaactatatatgtatatactgacacatatactatatatacttttaggtagatagttaatattatgattccttaggatttttttcagacatcctcactgttatttgatgccccccttttaacctccattcccctccttaattataggccttgggtttcctaggtacggttgcatatctcttatacatggctattcttctctcttgcatcctctgtcccaccaaagttccactttttcttgttagtaagtgtagataagtgtatttctttggaagacttgttgtactgagttctccatgagatatggataagataggttcattttgccattagatatacggtgttactttattttgtaggaatttgtaacattgctgaagaaaattggtcaagcagcaatgtttgcataaagttcaactaaacccacaattttgtttagtgtctaaatatggattgtgcaatttagaaagatggagtctcatttatttggtcttggaagaacatttgtgagtagtttgtgttctttaagtaatcatctgggattgttaactttatttaaaatatttgtctgtttcttacaaattctaaatatttgtagtatttcatttgctcgttcatttgaagttagaatgattggtccatggagaacataaaagaactacaagatgacatattgaatactaaaattattaacgcttttagctttaacagttcttagtaaatgagagagattgctaaataaagaagaaataagcactaactatattttagaaatgtacggatgaagagaggatggtgtcagatggactgttgaaatgaagttgagctattttgagtgtttcattgtgctttggaggaagggcaaagagaaccatgaaaaagagttctgacacaaaaatggttgtttatttgtacttttacaataaaatatgggaaaaatacagacagttcagtgatgtatatagaaagagaagaagagagtataaacatcttagcattaccatgaataaagattaaaatattgtatattaggctctgagcaaagtaggaaatcttaaaaaaaaacattgaatgatatttttgtggtacagttaaaaaggaaaacataaactgtggaacagagaaggaacatatcctaggaaattgctttacagagttaaggaatagttaagatctgtcctagctttactttttgtttatccagattgagttttccctcggtttgtgtagctaactctttctctggggggcaatcaatgatcttttatgcaatttctgaaatttatgcaagaaatagatgcctatgtcatgtcaaacatagtgatagaacctagcatgacatatgctaattaaacacttgtcagaacttcatgggaaaacttaccaagtgtcatttattttcaggctgagtagtgcattccaagaatagctctagaaagttactttgaataagacatgatacatgtagtatgactcctggacactaagtgtctgtgtttatgtctccaataatcctattacaaatacagctgctttttgccaaatgatatttcaaatagttgcaatgtatattctgaaccttgtaatgcatgcatctcaaatttaagaaaatgcagtcttggatatttcctgctttatttgcattcttaaagaattattaatgaaattgaatcttaattgaatcactctcaattcttcatcaattcaatactttaaaatgaattaggtaatttgaattgaattagcttattcacttccaccttggttcagagtgaatgatttcaaatgatgccaaaagcattgctcatgaggaatacttttgttgaagaggcttcctctttcatctcttttgatgctttctcttctttactgaactaattattctttttttttgacagctttaatctccattctcaagtaatatctcctttcttctagcccatttattccagtcttcagcaacttagccaatgtttacctcagcaaagctctctgatcctttccaaaaaatgaaacgaagattcatgcttctcttattgtttgtccttatcccttcttgttttgtctcagcatctttgatatccagtttcgggggtagtcttcctgtgacactgggaaaaccttttctgatgtcaatttcttaatcctgtgtctctgcatgtctttcttaggctgggaaactaatgaactgtgtgtgtgtgtgtgtgtgtgtgtgtgtgtgtgtgtgtgtgtgtgtgtagagagagagagagagagagagagagagagagagagagagagagagagagagagagtagggagagagagagagagtagggagtctatattccctttacctctatcttttctgtttttctttctgagccctaattatcatctctgatttttatctttaaagaatttaaacacacagaacagactgcaaaacaaaacagatacagtagcatatgtatagcatctaatacatggaatgtaccggcaggaagattgccatgaatttggggttagctatgttatataatgaatttgaagcaagggttaaagaattaaaataagagacaatttaaaattatcaaaaactgatcacgggatccccaatggaggagttagagaaaggaccggaggagctgaaagggtttacaaccccatagaaagaacaacaatatcaacccctgccccccacagctcccagggactaaaccatcaaccaaggagtacacttggagggaaccatggcttcagccttatatgtagcagaggatgaccttgctgggcatcaataggagaaaaggtccttggtcctgtgaaggccctatgccccagagtaggggaatgtaaggacagggagaatggagtgggtgtgtgggagggtgtgtgggagggtgggtgggtgggggcacatcctcatagaagcaggaagagggaaatgggatagggggtttcttggggggcagatctggaaaagggacaacatttgaaatttaaataaataaaatatccaataaaaaatctgaacttatggtaaaaataaaatcatcaaaaaccaaacaacacaacagccaccgaatatgttttataattatacacgactaacatctacctttatcaatatttcctcacctcaaatgcaactgtgtctaaaatatcatctttcaattttgtgtttcttaatgtctttgtggttttgaaaattgtaatttagactgacacaatagctctttgaggccacaagttggtttaatctttcaaaatttaaaatagttctagggaaaatatcagttgacatttgtttaaatacttaacttttattctgctttttcctttgtttcctagaaaaataaataaattttactaaatattccaaaataagaattttctcttggggataaataatcaaattctgtaacagtaagttgaaataactgctacacaagtttactattaaacataaaataaaatgttcagttatcatcattggattgctcctgcattgctctgggtaccgtttcatatgtgaatgacagagtctgttctgtttgcaaacatgctacaagcagtaaagatgtggctgaattaacttttgaaatgttaattatcatgaaataattcatatacatttcatgatgacaatctactgacaaatatttcatgaattaaggtgttttgaaataattataaatattgtcagcattaaacagaatgtctctgtagtgattagaaatcaatatagcagaacttaacatttaaattttcactagtctctgctatcttctcttaaaagttcgtttagtgtctcccattatcaaaagcaggaaaaggtaggtaggaacatccttctataaaaataaacttgaatgggtcaatttgtcttgtgttctgaaaccaataactaatgctttatgttattctatatatattcattacctaacatgagctatttagaagataaaatatttcaacttttgttcagtcattgatagatatacatattgaaatgtgaagtttagaattataaaataatggaaaagacactcttctgagagtatttctctctaatcttattagactaattgaattgttgcttttgtatgcacagtaatgatacatacagaacactttaatccagtgactgtatgacataacttgtcaacacccacaaacaaatttgacatagacaaagcattgctgctgtgaccttgataagtatcactttggtactataggacattgaggaaagaattgctatattatcagacttcttgtctttatttattctacataattcctgtttcaaagtgaattgtatacatacatgagaagaatagaaaaattacttagggcaaacaagtccatctttagaatctgatcatacataatgagaaaacaatcaatagagaaatgggctactatgttgaatcaaatacaattctgagaagaagataggcttctgagagaagataggcttcaacaagtactaaatttatatgtacatatatatctgtttatgataatttagtgatcacagaaatttctgagagacataagtttgcttaatttttcaaaattgtttcctcataataataattatttatgcatattaatgatgaatattgatgcaattaaatataaaaaacatttaaattaggcaaaaagaattatctccaattagcaaattttggttcaaaacaggggctttgtcagagtgaagtgacaacctatataatagtagaaatttttaccccttatttatatgactgaagattaatattagagtatataataaatatgcatttcaaatctaaaatttcagtgttatgcaagaatttatcctgttttttagagcaatgttgttccaaccgatttgactgtattttctatttttggtttacatttgtcgtattataattaggcttataatcctctatcctataatgagatggataattcaagctccatatggtgtcatttgtgttagcccattatttatttttcatcttgccatagtgttgctttactttcttttcctaccacagttacaaagttttagatagggcagcggaagcgagaaagtatgaatattgactttcactggagggaaatcagtacagagctcttaggtagcatgtacttgagaaggacactgttacagtgagtacactcagtggaggtgattcttcatcttgcatctgactgctcagtggaaagagagcagggcaaactgacttcctgagaacactcctgcaatgatttgctttctccagccagcccgcaaatccaatcttttcatcactttccaatgttatgcctctctaggattatgaatccattgtaacaggactaatgcattcattacttgagaactcttatgatctaattggctaaggaaatgcatcatgtcacatacacaccagagggttgctgtcctaaccaatttgctcaatatcttccaattcagtcagattggcaatagttattaaccattataaacataaattgtaattccattttcatcatttatatgttagtttatggtgctgaattattcatattagtatcttccagtgacaacggtagtaacaacactcaacctctatggagtgcttcgtgttccaagtacaactgagggttcttacacagagatcttcacctacttttcccatccaataaaacatgggaatattctcagcgtcgtccttcaaggaaattaatgatttgttgagaaaattgtaggtccagattttaaggaattttgtaattgatccagtatcttttcatttgagtacttacaacacgatttcctgtgaaaagtttgagtctaccagtgaccatggagaacgcagtggaaggagccggtgtattgatgtggctttgcaccctgctctgagcttgtaaagatgactttatcaacagtggggaaactggtgaaagtggtaaagaaaggcttgctgtgctgtgtgatgacagcaagcagaagtggtggtgctgtcctgaaacacctttgtcactgagcacttacacctagttaagttatttaatgttctcatccattctgcaagaactaggcaacatgacctatactttcagagctataagacagttagtcatagtaggcagaccttacagaagttatcttcccataatagagaaaatttggtactaaaattatagactttgcatatatgactttttctttttctgttacttcatgcgatttttttctttgacaatgttttgaatatatattatgagtttcagtcatttccaactacattttcagccagttcagtccccttactctcactctcttctctattcaagtttttttcttcttaagatactttctatatctgtgacctattgagattaattaggattgctttaatgaacatgggtggggaggtctggagtctgggcagttaatcagaacatataccattgaagaaaatgacactcaccttcaccccgacacacagagacaaaactaactttcaatagtatttcaggaaagagtgaagcctctttagcattttcttgatccatgatgaaataacctagacttgtatctgtagatgcagagacaacattcatgcaatggcatgtcaaacccagaacacagggcatcgcagcacttcttcccatcctccagctctttaccctctttctgttcctccttctgcacttttctctgagctttgaaatgtgtgatactcatgttccactatggccttgcatcccacagtcatttattcttgggggctttgaccagttatgcaagtctgcattaacctctgcccactgcactcagaagtttctcttgtgatgactgtgaccagaactaaactaggatcataaacgtaacttcaagaaaaaaaaaaccacataacttcatgatttttccacaaccatttttaatatttaaactcttaaaagcaattagtatttgttttattaacagtataaatgaagagatcaaacagtactgtcatgacaataaacacatgtacatgtttagatgtctagctgatgtagttcaaaagtgaccttggtgttcagatttccttgtcttgtgcatatttaattatctcataacaaaatgataattggataattactgaaatactatgaagaatttcacaaatgtaaagtcttggtacattttcttatatattttcaaggtataggatcacattactttttctacagatatatccagttaaatgtggcaaagaaaacagagcatttggtgttggttcacgttcgtgttctggtgattcttaaagtgaaaaaccaccacagatttctatgaaacctttatttgaaaaagatacaacaattttttttattctgaaatacaaagtagacttggaggaaaatattatcttcttagctaaaagaaatatagactgtccatcttgtaaacattgcataatgcataaacatctaaacattggactacttaaaatgtttagacattttaaagacattaaatgtaaagacatttaatgccctctgacttcccatcctgaactgtgcacctcaaaccttctgatggtaagtcaacttcctgtctccccagaatgatagtatttcatgtgagactttttacttattctcacttccctgctctctcaagcatctttgttggcactttgttttgtactgataaaaataccaagactttaaatctgtgatgttgatcacaatatttaagattttattaattttcatcatcattcttataaatatattaagtcatatgagtcactaagaccctttttacttttctctaaatattttaagcatgggatccaaacacaaacttgtagattgtttctaacttcaagcctatactaccagcacccttcagtatttacacttgtcgattttgcctttaggcccctgaacatggatgttcagtattgatttagtttctatgtcttgtgggtttcatgaaaatagactatgagttgttgttattttaatggcttttacatttaatgagtgtgtttattactctaagtgtatacttaattactattctgctgttcctgaaaatcttttcaaaaatcattcattttgtgtttatgtgtgggtaagagcaccaccgtgagtgctggtacagcagaggctagaggtcccgaatacccctggagctagacttacaggtggttggaatctgcctgctgtgggtgctgagagtcaaatgaaggccctctggaagagtaacccacgctcttcacttttgagccatcacaccaaccttgatgttccactaacagaaacattgcactgtgacatttttatcattgccaactgaggtcctctagctgaagtgataagacttctgaagtctctgctgtcggatgccaagctagcttccgtgtttatctgtgctgtgctgctctgctcacaatgtttgtggccaaagacaatagtttcctttgactcagtcacagcctgaaaaaaaatgctatggctgaagtaatatatatatatatatatatatatatttctatgaaacaggaaaaggcttattcaggcacaaagaatttacttgaaaacctttccagccagagctgtgaggatgagtttgttttctaacctgagtttctcaagtttcggaaacacagtattccgttaggccaccaggctagtgtggcaatgtttagatgttacttcaatcaaaaactgtatttcattaccctaggatctgtgtcatactgtatattaggttaaagaaaacaaaacaaaacaaaacaacaaaagctctcggtggttgaacgattctcagtattatgctacattgctgcattgcaggcacgagcatgttccttgagcattttcgagtttcacaatgcacaattaattaattgagtcaatctagctaaaacaccagtctgagttactgtctgcacgtttaataaatcctttgaattcccttgatctggcttgtttcgtatcctccctgtgctctgtagcacaactttcccaaacccataaaactttgattaatggaagaaagaattaaacttgagatacctgagtttgtttctctcccaggcttctctgacctctgggtcattttctaatgtaccttagccattttctctaaaagaaaacagtaaatgagaatagaactgtaatttaaaagcatgactgtccttgcttttaacaaatcttatagctacaaatccatgtatataactttacattcaaagagcgattcttttcctggaagtagctgatgttccttatgccctccctgatcacatacatgcatgtgtacaagttagacagagaaaaaaaaagtgtggcaaaagatgaaagaagatctcctcatgtgaccagtccctctgtacatgcattctcctgtaaggttaaagttgggggttatggatttttgcaccacaggggaatctacccattaattctcaaagaccctttccattaatgaagaccaattgtctcagttttattcagattctcatacctggattaaactgtgaccagaaatgtaaattgggggttccattggacatagaagtttactttcagattgttttcattctcagtaggtgtctccttctcaggggtagctctgcttttctaggtatggatagcaacctgtgcctgtctcttcactggaggaaggctcactgctcccccgcagagtggagagtagcctttagagctcttactttcacccctgtgaagcttgagtaagctgccaggctgcaatgattcctaagtgaccaaagtttggtcctcgggacatgtgcatggcatgaagaagagtgtctgttctgcagaagagggggttacataccctggtgcgaacacttgagctgggaaatgaaacctagtcaggtatgtttaagtctcccttttactttgtcttccacagtaggttagaagtggcgggagtccactgtttctatctttgaccacagccaagggacccaggaatctcttcactttaatgcatggatgtatagatcaagatgtctttgaggtagtgagcaactttggtcattgagcagtgtctctcgaaaaaaaaaaaaaaagatgagaatatctacagttgttcccaagaagttgacttatcatctcctccagcaaatgctaaaatgagaagtgcagatcattggctgaaagtatagatgcagttcttcctcctacacattttaattgactactgttaaaattaactatttgctactagtgcccttgaatgttacagaagagggatttttccacttgaggagtttaagtgatagatagatagtgtaataattacattgcctttaattaatattaaagctggcataggccttgtacagtgacggaaatataaggctttctgtattatgcaggggactcatgagtcacatggtagaaatcatgtcttccttgtcctctttgtagtttaccactgaacttgagagatcttgctctaagactcaacacctaaagaatgtattttgtacattgttcaaagctgacctctgtttctcgaaaagtttatttgtactttttcatctgtttagaagcatacatttttggttaagagactaaagacaatctctctttgtctctctttctctcttttttttccccagagctaaagaggttgagataaaaaagaatgactgctttaaaagtcacacatggctgtaatttaagattttttccccctctcattgtccgtaacagttgaaagaaaccttcaatgaaagtttattaactaggccaatgcctgaggcaataaaggctcatttactaccagtttcttggctgtttttcttcttctatttttcggttaaactcatagcgtaagataatacttcacaaaattaaacctttgaccttctgtagagttaagtctcctttgattagataaagtaacaatttatggtctagctgaggttgcacatgaaatgaataatgcaggagactccgtgtggactgggcagcctttgcttttgaaaagatgaatgctgtttaaagcagaggaagtccacttaagagtgttgtctttattcacaatgcacttcagcaacatttcaaaaaggttttacttctaaaatagagttatatttgattttttaaaaaatttcatcagaaagatctctggtaaaatactgcaaatagaagttttgagcctctcacgggatggttgtacatatgatagggccctataattcagatgatacaaagaactagctgagttgtcccattaaatatatccatgaggaaaaaaataagataacttatttttttgcatatcaagatgaaaataagaactgagattggtaatagcatttttggggcctgttaacaagactaaaattaaaagactgtttagctgatttaagatatgaacataaaccaaatagaattatgttaagcagagtctcctttttaagcacattcataggacttcagtttcttaacattatgacgttagtagtaatctgtttgattaaaaaatgcaagacagtcatttcctcaagtcacactacaggtctgagatatcataacggtaaaagggtggtcagaaatgaaattttaggtaggtgtttatgttttaaaatgaacttgcttgaaaatagttctgtgggaagaaataagaaaaatatcaaatatacgttaatggaaacgttttcctgaaattttactatgccccaaaagagatgcacatgtttatgagtcaggtctgctgcttacctgcgtcttagcccagaggagacagagggaatggcaccatgggcagctcctgttccttgcaaagctgctgtaattagttggttgtttaaattactaattgacatgcacaagttgaatgcctaagaaagtgttttagtttggttctttttcaattagcttaaattatttaaggtgaataaatctactgccttgatttagtttcttttaatagaatctcatggcacaaaacaaattaggtcaagaagagccactggatcagtacaaaaccggatgctgctctcacagtgaaaacctgttaggaaagttcaggacttgctgtcactattatcctgaaaacaaataaaagctactagcaaacagtgaataactcaaaatccccaaagtcacatttattttcctatcagaagtaaacatctttttctattgaaatattttatagcaaaaaagggagacgtgaataatagaatacccatctgctctctttccaggtgagctatgctgaatatggtaatcaggttttataagggtacatttttttattcttgaaaagcagcaatgtcatattgtgatcaagctaaatttgcctatgacacattcaaggtgttaaggaacttcatagtgattacaaagttgtgctgagacaaagacttcatcagcctccctctgcctggcacctccctcagcttgtggaccacattgattttccttttgaacattccctatcactcagagggggtgggtgcagtcctttcaaaattcctttgaattgctttttccccaaagtccaactgtaaggctctacttgatgcctacttttctaagctgctttttgcaaaggaatgaggaaaatctccaccttgtaggctgattctgtccccccagaaaggctgacacacctgcaagaccataacgtgtagaacgtgctctcttgagtgttggcccctgtgtacttcttgtctgttactcagtgatgggagctggaaatgttcccaattcaccctgaccctgaactgaattttcttaagacaaaaaacaatgtccatcaatatttatttgtctctaggactatacgatcctcatgggtcttttcatgaaaatatttatgttatcatatcagagaaattttatgtccccattttttcacatattttgattcctttggataattttctctaaacaagtctcaaatgtaaataataataataataataataataattaataatgatgataataataaacatttcttctctcttctcctctcctcctgtcctttcatgtcctctcctctcctctctgtctcttcttcctctcttcctctctactcttcctctttatctcctctgctttcctctcctcctctctcttcttcctctcctccctcccctctcctcctcttccttctcctctcctctcccctttcttctcctnnnnnnnnnnnnnnnnnnnntcccctccctcacctctcccctcccctttcttctcccctcccctcctcttgccttccctcccctcctctcctctgctctcctctcttctcttctctaccactttctacttttctatccatataacaaactagtccagcagagcaacaagggtgcagatgcattctgagaagaacaaagataaaagagggacatattgaaatatgaaagaaattgagacaaggtataatgtttgagaagattgtttaagttcaaatgctggcgagatggtacttttgtagaataaatatgattatggcatttttaaactttgctcatcagtctagcccagctcaacaatacattacctagttgcttctttgaaaatatctttttcgaatgttatactctgtcagtcatactcaggctagttagaactgcctgcctaggcttaattactaggtcattttacttgatggctataaatataagaagaaatgctgggccatagaatgacacaagaaagctaatgctttgttcattaagaaatagaaaagtaatatatgggatattatgcttcggtgaaagttagagaagaattttgatgatttctgttagcgtgcacaatgagaattagatcaattttaagttatgcagaagacaatattcattttgaagtgatatgcactagatataggattcaggcaacattatgaatgttgaatttcatcaatactacatataaaagagttttgcacacaattaaaggtgaattatgattccatctatggcaaatatattgtgagttttaagacactatcattaaaaatttggtcagatttctctgccagctgacatatttgtccatttatttgtctctttaacctggagtatccataaagtccaaaaggtataaaggaaagagatggatcttatttcaaacactgtggcttgctggattctcttctgttccctttaactttattttcaataggttcagggattaaatgtgacttacacgtgagcttgctctgtcattgtttaatattgtaatgctatggaaaatattactatctttgtgcctatatctcactgccaggacaacaaaattaactttttatactacccatgttataagttcagtccccaagtgatggcttagtaattattttctagagagaatagtattaaagaagagtaagaggtacacatgacatgctaagcttgcctttccactcaggagctcaattctactgaaccaaattacagtaatttaaccctttttgtttgttctggtttgtcctgtttctctgattcagtgatcagaaggtgcgattttcaaaggcccccattaaaatgcttcagtgatttactgattgccaaatggcatcctcatgctgtttgaccctctgattccgctgaggctctaacccctttattcagggtaactgaaatctcaaactattcataaataataatgataatccttatgtttatttgatttatcaatgattaactatacaatgataaggcagcttttataatattgtttcaatgaaaatataattacatctctttcttgcttccattccctccctccagaccctcccaattcctttttctccaattaatcccatcccccacagttttctgactgcctaaatacctgtacaataacatcaatagacatgctaactgctaactcagaaggagataatatgtttcttagtatatgtttatgcacctttgtgaggtagcttttttgggggggggttgttattgttagtctaaacatttctaaaatctaattcaatcaattgaaaaactgaaaactggtatagaaagtgtttccattagtggcctcagggatcaattttccttttctccacagaatacaaatgtgctacaaagggcaagaaagtcagtctaatggacattaagagacaagttcacgctgaaaatattcactttaaccagatgcacaattaagtttcttattctagtagcttataatttctgcaatttaagcattcaagatgagaacagacatggttcaatcacatttttaatttatttagaaagtaataagaaataaaataactagagattagtgtcagtttttggacagctggtatttaaataaggataagaaaaaaaagtagagtaagggaaaaaaaagatactggtgttttcaagttgctgtactgagccaagggttctgtgtcttggagtgatttcaattgagttgtaattcagactcatatggagctcacaatgcaccttcaacgtagcatttcaaagtctataggaactgtcaggagcagaaagattgcctcacagtaatgagtgttgaattgaactatgctttttgatgttttactttctgaattgaattgttagacaagattaattgcacacagtgagagttttaaatgaatgactatgtaaagcattaaattcctctctatgccacttggggaaaaaatagctggaaggtttaaatgaataaatgtatttaatgcacaaaatgcctgggctaattttaaaattcctttactaacatccttattgaaaatagaaacctgctttattcatctgtcttggatatattgctctggttgaagtaatttaatatttcagctttctactaatcttctagttcaacagaagtaaacaatagctttcataaattaaaaatgcactcttctaaacatgtttataagattagaaaaaaaaaccaaggctgtaaacatttatgactgaagcaaactagattgttcaaaccctgccatgatgcatcgcgtgtatcaatatggcagtgatatcagttagaatgcaaacaagcctttaaatgatgtgccccttcatttcagctggagaagctgcttcacaccatctgcctatcagatggttaggaaccaggactgcgtattaatgccacatgttcgattttcctcctccttgtaatggttagattcatattgctaatagctgtgcatgagcactgtcgaggaaatttctgtgacggtggtgtgatgagatatttataagccgcctgtctccctgaataatcagggggaaagaatgccagacataaataacctatcaattccagaatattaataataactatgcttgaccataatttcttgcatgtttaaacttgtttcttctgggttttagtaagcaatgtagactaataaagagtgcgttctatggaatatttaaatacttaccatctcttcaatgtaatataacttttcaaccattaggatttgaaaaatgcactttatatggaattcaatgtaaaagtagacagcatatcaaacatttggaagtcatcttgatgtctttgaaaccaaagatcaaagattgggcttttcaagttaatgagcaaacaaacagatcagagaaaggatttgacagcaatatgtcttctttattgatatttataatctacagttgtaatcttctacttataactaagggcactaacttatttgaaataaatataattagatcttattctttttttaaaagggtgatcaggagagcttaatggcatttgaaagaatttaaaggctatttaacaaaagttgaaagcagaaaataatggctttctttgtaaagtaagaggatgtagtcacacagtcacaatgcttgcttcccttccaaaagttagacccatggtattgcatttgaaacaccaaggggcttcatatcaagacagcacccagattttggaatcagtgattatataataaaattaatccatgtggatggtcaaatcaaaacgtgcttaggaaggtaaacggctacattctaagaacttcgatagtggtttagcatgtttagggaatggaatcaaggagttaattatttcttactgtaagaagttatgtttttttattcattcatctgctcaccttgttttctgtcttcttatatttattattttcaatgtaatctttatgcatttcaactggttgctttgctctggctcttctctctccttttataaatgagtatattgagtttatatttccatgctgatttttaaacattcacttttgaaggtcattgcaataacattcctcatggttaataagccttcattataaaacagaaacggtgtgtaaattttagtataaatttctcaccaattacttttacatggaaataaaaagtctcatattaaagatatcttttgacccctccccgttttttttcatgagataccaaattgagtaatcctgaaaaggaaaaatttgttgttttgactagaaggaattaaaagccttgataatgtgacatggatgacactttggagtgagtcctgaaatcaggggcggcagaagtttcatgagtctgaggcagagcagagctaggctctgtataaataccactagagaggagatgaaggcgaatggtacatattaaagattactgatatttcctccagagaataattatttgctttatgaaaaattttcatggtttgaattcttggtgttctgtaaatcatttattttcttgtcttctctctctttctcttttttttaaggaagttaattagtgaacaacatatacaatacagcctctatgttaggctacaatgagattaaaactatgctttcactagagacaataagttcagaggatttgaggattaccttggagatttgaaaggaaaggaccagtgaaagccaaagggaacgatggcaaatgtaagcggctgccaaatggcttgtgatcttctcaaaccttaggcacaaagttcctatggagagtcatgttttacattaaattaatgagatttactatcccttgtgtattcacatacagtctaacacaaataaaaaatgttcaggtactttttagaacatggtcaaattgactgctatgttttcttgtggctgtccaagtgatcaagctggagatagaatgacttgagctttcagtaataggttacagcactgtgctaacatttgtgctaagtatactgagaatctatccatagtctcttgactttatgacctaaggatgtagccataatccccgcctcctttaagctacatctgcttctctcatttatatatattttaaaaagacgtcaaaggattatgttgctcttcctcaattctatatgaagactgctggatgacaagatggtttctgtagtagtattataactataatatgcaagtacagatcctcagactttcaacatcagacctcctgagtcagacttgtagagagaggtgatgtagctatgtgcttagtttggaaactccatgattgtttctgacacatacttggaaggtaaattcttgtccaaatgggatgagtcttcaccacaaagtcagaccaacatgttcaaaaacttaagtgagagaatgtgatgtaatccacttgagtaactgaaatttggttatgtttttgggactcataagttaatccatcactgggaatgtttccacatatactgtcagggaagtgtgcactaagaagcccaatgacactgtaaagtgtaatatttggttctaacagcagacatgaaatgctttgatcatgccttccctttctatggccatcttgagttctatgtgagtgaaagagtacaggttgggagagtgacagttgttaagaatgcatggtatataatgctatatgtacatattatgctcacctttaaatatatgtgctcattgcaccttcagctatcatgtgtaatacaaattggactccatggttaataaaacacagaacagtacacaaagctgggatggtagtggaataggggacgagtctgaaaatttgggtgagaggaatgaatagggctaaaactcattgtatacttttaaaattattttataattacattattttctctttctttttctttctcaaatcatctgatataccctccttgttctttttttaaaattcttatcttctttattttcatgaactgatattatatgtatatatattccctaatacaacctgctctatctgtacagttctgttcaaaagtatgccattgcataatgaattagtgtgctcttttctgaagactatttaaaagaacgcatatctggacttatggaataagacatagagtttgcaattgcagcagcagtagatgtggataaaaatgttgaattcaaaatatagaaaatcaaatacaaggagggttcatagaaccaaaaactaaaattgttttatatatcataatttcttaccttgggagaaatcagaatgttaaattaagtcagtcaaattatagcacttgtgttcatgggcaagtgtgtatatggttgactgtgacacatataccttttggagttctattagaattgtaaaacttgaaaaaggtatgaaacaaatttgcaataatagaataaaatagtattattagaagtatttaggaaaggagtaggcaaatatgaataatctagaatatgggcgtagataacccatgtttactactgaaaggtaacacttggatcttgcttacagaggaacaaggatgtacaacaggccttggctgtagtgaatagaatatgctattctttgtatagatttcatacctaatcattatctttcttttttgagctttgtttggttttatacaagatgaaactattctcaaaacaatctattggttttcccaagatcacttctcatacaattatggattgtgttaattggaaggtgttgagtattatgtaatggactcttaagtctttatttttgaatgcaattactagtttcttcttagcataaagccaagcttaagagctgagaagagagatacattggagaaagtcaacaccaaaaaataaaagaaaggaaaaatgagatgttcccctttgttaaaggcaaaaagcaagggaaaatatttttctgggaaacacacagaggatataaagggaacagaaaagaaaatattctgaaacatctttgaaggaaatgagtaatcaaggagaaaattcaatcagaggaagatgagagaatctgttcaggttgagacttgaaaggcagcgaatactcatgctagacccaggtggattctttgaatttagatcaatgcctttaaaggagcggttatgagtttttcaagcaaagatctcacctgcagaccctactgactttggataaaaatggtcaacgcccctttgcactgatctgaagagaaggtggtgtcttctatgcacctattcgctagcaaagacttccaccaagaaaagacttccatgtaattctacgggcagcagtgttttgctatggtgactatgagtagtgattagtgggtaggaagaggtgtgttcattctctttaccaactgggagtagaaataaatcatccagataaattcagaaggcataaacacagtggtcaaaacttctaatgcagcagtgtgagaagtgtgcagggaagcctatgatgtcctttcatagataggtaatgttctataactagcagacattatttatgtttctcttggtgtgtcaattttgtcagattgtgaatgccaggcttgaatgaatcaatttggtaaaagttgatatattaagaaggtaataaattttctgttcaacattattgtcttgctgcctctaggattgtactactgatcactataatttacgttctggtattccaagtgttgacctcaaattctatttttggatcatatctattattagatgctgtttcataaatgaccaaagtgtataaaacaggaagacacagtggtcaatctaggcctaaatatagctttttagaccttgtgttacaatgatcagaatacactcgtttcactgaaatcagtagttatatatttaataagtcgcagcggattatttgcagagctgcttttgtattttattttaactttttacatcttgagccatgcaactatataacacttagccattgctgttgaatacttcagaagaaaaacaaatgcatatgcagttatacacagtgcaatgcactgggtaccgatacagaaatgtaaacataggccttatagttagaggcaagcaggcaccatcacagtccaggatatggaagttaagactccagaatatgaaaagaatttcactagaaaatgggcaatcatagaagtgagttcaattaaaaaaagacatagaaagttgatgctgcaagaccatgtatcagaaatggttttgtgttcataaaagaaggtgtgagaacttgggtaccagatggaagctttgcaactaatctgcatttccaacgttctttctccttctgggcacctgtagaggattttcaggagaaagtggaattttcagactgtatcgaaaagttcatccagcccacatgtataattgatcctatggaatatgtgttacttctctgctaataatcaaatcaagaatttgacaaacatctatacccatctatattaatgctgcaatggttgatttggagtggaaatatattatcagtattacataaaggaatcagatcctctaatattcatttgtatgtgtgtatggaaagacttggactattacacacaaaagtctgaatttgaattactttgcttttaatttattttttaaggtctgactgcagctgctgcagctgctgcagctgctaccaatgcagctattgctgaagcaatgaaggtgaaaaaaataaaattagaagctatgagcaactatcatgccagtaacaaccaacatggagcagattctgaaaacggggacatgaattcaagtgttggtaagtttaatgttctccagctattcacagtcatatttccatagaattatttttctcattgatgaagtgagtatttaagatcaagagaggagtatatttttaaggctttcttttgcctctctagtgtgtataatttggatctctcaatgttattttaaacataagatcaatcttacaactataattttgtgctacaagtactgaattgatgcatttcttaattcaaataagctttaagaatcaaaaatatagataatgtgaaagaaatatggaaatatgtgtgtgtttgcacatgtgtgtatccaaccctatttgtcattttaaaaattatttattatcgagtaagaaatttcatccctaaataacagagtttatgcattagctatttgtccttcatatggggtgccttcaggtcccttgtggatgtctgaaataatggataatgcatgttattatatgtaccttgctctcctcatacatataatacaatttattttacagattgccattttaagatatttaaaacagtaggtattaacaaaatatgccgtttcaaaacactgtcctaagagttacaagcttttacttttctggcgtataatataattgatccaagccaatgcaaaaattatgcaaaacttataaatgattacttaaaaatatcagttcagaacactgtttaacacaagcaacaaagactacacaaagataaactgtggcaggggagattgtaagttgaaactttccaatgttgccagcaatatgaattatgtttttatgattttttctatatacaaccattacgaagacatctcccatttgaaaagcacattataaacttctcatgatcatctggcttaccttctgtttacgctcacaatgaaaccaaatgaaacatttttaccttacaggctaatcacatggcttgtgaaaggcagctttaaatgtgggttatttaactaatttattacttttttgcaaatgaaatatttgtaatctgggttttggtgctgcaaacatttcatcctgttcctatactctaatgttttccttaacactacggaactgatgttaaaaatataactttacaagagaaaaatcacattttgtaaagaacactcatgttatcctgtccatcacggcactaggcaacacagatgtttaccacaattcaataaatttcccttttccatgcagcactttaaaatcatttcttaagttaatcaatagctctctgcttcccacccattgagatgtagttacagacatatgaaataatatgaagtttaataattatcatttcattgcaattgctcatacacacatactggaaaaaaaaaccactagggtagtaagtgatttttaaaaatatatacatgcacacacacacacaatttcttccatgaatgtaaagggacacttttgacatacaaatgggaagaataggatttctcagaagaacctcatatgggcaactgaaaagggctggatcttgaattgagagtagctggcggtagctattgttaggacagtgaaaatatggatgaccagcgaaagagatggtgtcaccacaaacaaactcagggatacactagtggcactacttgggatcctagagatggctgaggaagcagagaattgcttagctcacagttggttcctgttgctttagactttaagtcgactcaatagtgaagtaaagtgaaataattttaactgcattcttttaggactgttaagtgctttagataaaattatcttttctttgactgctaaaatagaccatctttcagtacttataaagataagtgatcaatgtttacctggcagagagataccaaggtcataaagggtggttttcccagggtgagactaattcggtgaactgtaacattcgggcctccatcattccccaaatgaggaaaacttttgtctacatcatttgttgtagtgggggttgtttcatgtcttatcctataagaagaactagtctactcatcaatgaacaattatagtaatttttaaactggtactttgattatttccaaagtagactcacaatgcaagtcattcctgatggtagatgctagaaggcaggattaaggggaacaacaccttttaaagtgacttattcaaaagaaacaatgtcttaattcacctgagcagctgaacagcagttggtttttaagaaaccaataggcagaagtaaagaagtaaatgacttacagttaagcattaatgtgtgtttcattttagtatgtattaacatttacccagtgtccaaattatagcttcctttaattatttaggtagttaacctattatcatgccttataatacacacaagtcaaatatcccattatattttagttgggaaattaactttttctattagttgatagttcagctgttatatcatagcatgaattgccttgcattcttttcaaccaaggggtatgttaacttgtacctttttagaagactgtgctacttagagacatttttgcatccatgaattgttatacctacccccctccgagggacatacatcgtttctattatggaccactttagctgatttgtggggcactactgctgtcctcttcatcccattcctaacatgctgtaattgtccaagtatttacaacccctattgtctttcatcaaaacctccactcttggatatttatttagaaatcatagacagtgagttttaagtaggcggagggtggctgcaaacagtgaaggaacccagtgaaggtcagagagaagtttgcatagagcaaagcagttgctgaactgagcagtttttgtggctccaggcatctacgaaaccaattcctgcctcttttacatggtcaataacaatttgatcatgactttgaaaagttatgtaggtattctgattttaaaagtagaagacaattggaaaatgacagtgataattaaaatctgtgtatccagtgcttagtatgttacccattgtgtcggtttctcccattatttcaaggttgatattacttttactattaaaatctccttaagattgccatcttagaactttcttcctatttttattgccatcaacaacagctccctcctttgtgttcctctttgcttggtggtgttacttctgaagccacagagctgtgagaaaagtcgaaagcagttttacattgtacttcatttaacttttgagctcagctcattgtaaaaatataaaagtggtctaatgcactcccagtccaaaagggctgcatgctaatggaaggactgccctacagcattgaaaggtgtctaggaagaggaattgtcaaacttgaattctgtaaagaatcccaagactcttaagcttgtgttccagaattcgaactatttgtttttgtgattgctcttactaacaaacattctgcaggagtgacatctttcacagaggtcatgtttagacttggtgtattgctactatgtagtctcgcccacacccagtgacatttctattgtcaactcatcatgtttcctatgacttttgttcacattttaggctttcctttataggtgtatgttttcaattagttaattgtaaataaattcctatagatcaggaaaataaattatgtttctgcttgattggtcttggtgaggcaactacaaaatcgtggtaaaatgactttcactgattcataataagttatgaataatccataatggctaaaagttagccataaaaatgtattttagaaatctttgatgttgacaaataattgctttgcattccaattttagatgatagccttgggcccatttctttccaagaggatgatgagtgtaggaagaggtgaggaactcaggatagatcggagagaggcatcaagcttgctgagtgaaatatatggtcacatcacccttctctctcctccacaatcaattggattcttttagtttaatatttacttgctgagatgagacactagtctgcatggtgataaacagtcggctcctggcatctgaaggtgacctgtcagttcatatggacaaatcccctgcttactgaaatgtacaaaataaatcattaaagcaggcaggtgctcattcccagatttaaatcaccatagatttatgatttgaattaatgcttcatttggccatagaaatagatactgagacaaatgatatgcagtggttggggtttccatactgtagccatcctgatattgattactgagatgtcttagcaatctcttgtttatatcaagtactatcttgtgacaggtttgctgatatgagctacgttccagataagaaggaaaaatgtcttggcttctttttagtggcaacactctctacagaatataggccagataaattactattttttcttctttaacaaccgatctgcataaccagcttaaacatgctgcttgcaaattggaactgggatattagaaagggaaaatttaaaacctttgaactcaaggtcaatttgacagcatccataagttttctttttatctgtttatcttttcttttggcattacgctcatctttaaggattgtaaattaatcacaatttgtttaatctaaataaaggacccttagttttacttctggttttgaaatgctatctaaatattgatataaagcatctcacagaacatctatgttatctaaataaatacttgctaaacatagtgtcttacctcctttactaaaagagccataaaattcacctttaaaaaatacatgcattaaatgttattccaaagtatgtgagccataatttaccaaaaatcaagaaaagaattcattctctcaacattttatttaaggaaaacactatgtacacagtttagaaaattcacagaggattcaagagggacttttgccagtggctaatatctgactcataggactggtaaacagctatcaacaatagtagatttctggcttcataggaaatgagttcatatctattcaaaatgtgatctcaaaacagatgtcccaagaaaatctcattgtttaaactatagtcataaccccctagctgctgttattacttcaaggaagtgaagtcatctcacgacttcaatactgtgtctttctccactccatagcatatgggcaggcctgtgctcgttcagcaaatggcaaagctgaacaaatgtcacttgtataaaatacttggtttttttttccaaattgttctccaatttgacatagttaacaggatgcaggactttcaagcaaaagtaagggcatgagttgagttgggaatgcattcttcattctttctaacgtgttcttttcctgtcctgccaccaacaaaacacatttattaagaggacaaaaagaccaagcacagtgggagacaaaatatattccctagttgaccattcccttaccttgaaacaagaaaagtagccttaaaggatatcttgctgatatagaatgactcgcacacaagtgactttctaggacagaagtttattttgagggaaaaagaatgattttatgatttaagaaaaaaaatcttggagcactcgagacagcaaataaaaggaaactgagagccaggccgccatgcagagctctgcagttgcacattggatcctgccttggcaatgttaatgaacctcaaatccttcctataattagatgagggaattgcttatattttcaaacagatgatgctgctataatgaaacgattgacagggaatttaagagtgtctacagtagtcatttggtttctgttataaaaaaaaagtttaaaaagaagattggctttagacataggtcctaagagaggtagtaatttacataccatgctatgacaggtgtcttcgcagagtaagaaagagaatggaagactagagcgatgatgggcaggtagagcaggatttttggggaggggtgtcctgtgcttagtctgcttaggttctttaaaaggggccgagactcaagagatggatccggattgagtgcacagctgtaactgctgatgagctaattgctccttatctctcagccccattcatcttcattttttaccaattactgagaattatctgtgttctcagttggatatgagagttaatcctttttggttaagctggcagtactgtgagcagattccaaatcggagggtgaaaaagccaggagcacgcttgctctaaaaatgtctccagttcaatgacagtatcactggttcataagaaatttgctattgtttaacagattcaatgtggattttcgactttaaactttaacatggtttcctaataataattggaaagaggcttcttcttctctgacgagaaggatcaaacgactgtctagtcagggtctagtaaatataatggaaaaagaaaaacctacgctaaaagtttaaaatagttatgacatttggaatgtagaccattttagaactgatgattatcaatttatatgtaaaacttttaactcagccattcctgttcgtacatggtctcatacatgttcaagaaatgttgcccaactagaagcctttcataaatgtcacattagtggactaatggaaagcaacacaagtaactcttaaaagtgtagtaactgccatgactagtgattcaattgattgtgaataggccatatggttaacatcattccctatgcaaaggatgtcttcatatcctgacatctaatacaaagttactcaccccatcattaaaaacaaagaaagggattaggttactttttcatgaattctgatgcagttataaatatttaatatctctagcatttctctttactaaatatcttttagaagataatgtaaagagtataataaacagctcattcaaattgaaattagaaaaacaaacttgatatgacattaaaacctcttatatcgtatgaccagggaaaagccttaagatgtattcacaaaatacatggaagaccatagaaaatttatcttctacttgtaattaagccaataattaatgcagctccttagataagttttttttgtaatgctagatatctttgtaataagaaggttcactccggcttcttacatcttcttgactttgagggctcagtagaagatataatatagaaaggcattctttctagtcgttttcaaactgaatgagagagaacccaagagcaacttacatgtctcaacaaagaacctgataaatagagtgctatgtatctatttaaaatgttatttaaccattatccatgatggatcacaattgacaatatttacattgactgtgagaatacgaaggcagacaattttctttggtgctgtgcatctattgtcttaatgtatggatgaggctggacaaaagtttttgtagttttaccatggtaggaaaatgtggctattaaaaaaaaattctttaaaattagcttagttaaatgtgtcacagacaccatgagccaatcagcattgtttatgcttcttacatcatttgggcaggagagatagcttcattatctttcattattgtttcaaacattgttgggttttttttgttgttgttaaataatatatatctatctgtgttcacaagaggtgactgaagggtgactttccttctgcattaagacacttttttctttcataatacttaaaatatagtcctatatatcatcttgaatattaataaaattattagactataaccaatcatttgtagtactttcttatatgagttgctaaatatagctaaatatatttttggttttataagccaaatcttatttttatgcaatatgtttattctatttctagaagacatttacaatgtatattgacagtttgaaagtagtagacaatatgcaatgcttttgtttcagtatcaataatttttgtaaataaggatggggtattaagagaaacctaacaattgaagcaaagagtcaattaaatgatttttgactgtatatcttgcaaaagcatgaaacaaataatttagaatatattcagaaaaatgagttataggacaggttccctcacattccaccacattctaccaacccccaaagtaatattcacaggaagtactattatccctgtaatacactctcatgatgtgttgttcaaatacactttgtataaaaagtatctttgtatataaagcatctttgtataaagatatgccaggttacactcaattcttttatgatcaggcagttcttatttgactcagtaatatgttccactactcacttatttttacatttaacttattatgatgaacaatatgtatttaaaataaaccttttacctttttgctttctaaaaatataatgtccaataatacctactttttaaatagcttgtaaaattctagtgaatgtaatatctgagacaaccctaggacttgcttgacactttgtttatgtgcacacaagtttagcttttttgcacctgccaccagacttagcatttcacatttttattgctctgattcttttctgaagtgttcaagtgctccaaaattgtacaaagtcatttgagtgaaccatgaattttcaaactgaatgcaaagtagtctaaccaaaggatttgtaaataacacagtgcttgacataaatgtctcaaactgtcagtttacctaagatgaaataatgtggcagacatacttttacatgctctggatggcacagcccctccccttctcacagacctggataatttggaaaataagaaagaatggaggacttaaatatggttttctttaacagcaggtcataatggaaacagagacccttataattcagtgctgagagaattaccagtttgataatgattaggagtgttgttattaaaacagtatgtgcagttcattttcaacagttttgaattagaggctgcactaatgaaacggatacggtttccttcacaaagggcagatctgttagttaatatcgctgcagcagtgccgtgcagaccatgcctttagctctatttgtatttcacagcatgataagcaaagagtgttgattttcaaggatcctgctgatggaaggtaatggcattattacatctttatctcaaaagcagaactgagtggtaaatgatttttttttcggcattgcacaaaagatttcttggttagaaagccttttttttcatttctttacgtcgttttagtcttggaaatgatatgttattatttaatgtctgcacagcaagcttgaaagcacctaatagcgaatggatttggagtgaagtacctcctgctctcagatatggatcttctcagtcgcgggtagtaccagctgtcgtcccagccacactgctgtgatttaattagtctgtttatgtcctttctaataatatttccatctctatgaaagggcaaatgcgacagggactttttccctttctagttctgcaggctgaagaatgtggcctacatctgatatgtggagatgcaggattgaatctccatccctgtcacatcaagctgttgataaatcggtcagccaaaaagaatagtcacttccttcgggtcatttgtaggctggtccttactgtctgcatagggacaaagaaggggacaaatgtatttgagtgcatacattgtcacatatacaatacattttatatctatgaataatgacatttataaactaaagttagaattctttatgatatatgtactgaaattttatcagttttgtctatatcttcatagcacattttaataattttctcttgattcttacatgaaaaatgcaacaatttaggatttctcagaaagtttttaatcttgctagctagaaatttgaagtgaagtaatgcactttaaattatctgtatgaccaaaggtcttggatctgtgggtaaagcagtctcataagttattgtattttagattttcaaaggaaaaatattggtacatgcttttcaggaactagttaattattttataataaattttctagaagatgtatttaacttaaacacatagactatattccaaacaactgaccacataccttagttaagtatatataaactgatgagcaagtatgtaggaaatgtaggttatttattataatgtggagattggtaattcccagacactataatatttaggtaattcatgtcatttcaaaactctggacttgggaacatttttgcttttcctactgccacagggttctgtgagcatgcaacatttcagaagataaacctgggagaaaaataggtttttgaaactaatttgtccttaatttcacttattttttacttctgaaagagtctctagcaacgtacagtaatgtattctgtccgtttggggaaaatagactgatttcttttcacctcaccccatttataaattctacaattatgttgccatttttactagatgatttagctagagtttttcttctatttttgtcatttttactttagttttactccctcacatgcatttttgagaggcatctaaaagttcatgatttactacatgacacaagctcaaagtttcatatctgtgcaaatggaaaggttagacatcctgatgtggtcaaagtgcttagttctttgataaacaatgttctgtgacaatctaaccttcatccacctagagttactagtggtaaggcacactcttaattattttctcctttccttctttcattcatctgccacggtgtaaactgcacctacagcaatgggaaagctaagctctagaatagttttaaatacatttaaatacatgtgttaatcagagcatttcgtgggaagatttcccatctctgcttatgcacgttggtattatttcatatcatttacatgctttttcatcataatatatccttactcatcaaattgctaaatagatatgtgcaaacaccatgcaatcatgtgtttgcatatatatgcacacatacacatgcacataccacaccacgcacacacacacacacacacacacacacacacacacacacacacacacacacacatacacacacacacatacacacacacacatacacacacacacacacacacacaatttatcactacattaggctcctgaatgtctcttttcaaagtattacaagcataaattctatttacagacccttttcttttcagatttagtttctttaattatattgttttagagaaaatgaaatcctcaagaggcacaaatttggcagtggcttttccctctttccgtatgtttcctatattgtctgtactaagcgtagatgattaagctgtcctgacacaaaccattttgctgctttgaagaacctcaccacggagcatttgatggtattttttattaattggataaatgaattgtgagctgtgtggttgcatgatgatgcactcgtttagttgttgctttttgccttcctaatctctgtcatattggatttataaatggaacagagtgacctttggaacagtgatggaaatgaagagataaacacaacttgaaaggacaaaccaattaatatcaatgtgtttgctgcacatccaagaggaattttaatcctctgctctccacgataaatttgtggttcatttgttgagtaagagaacacagttttagaaatttacaaattttcactcttgtctcttataaaagtgctacaattttttttgaacacataaaacacaatattagattagttttaggaaacaaaaccttgatacacccttcgaaagtttgatgacatctctctttaaacaaaaaaatatcttagcattgtatctgcacatgcgccaacacaaatgtatcaaagatattaacatgcgcatatatgacattataaagaaaatactgtgtccttgattatattcacttcttgactacaccacttgtttgtaaatttagactcatatgcaacctcatgtcatagctcatacaatatgagtgaaattgcctgattcagggaacttattcaaatcatttattactttaaactgccatgaactacaatgtaatttttaatttttttccccaaatcagctaatttactcaagtatgcaataaaaatgaaccctgagcaacccttcctgtgtgctttctctttggccctcccagtttttctttttacctaactgaacatagtttcttaaaacaaagagccaatcccactacggagttagcttcagcaaccttgcacatcgcatcccctttaatagtttaagtataggatatgatcaatttagtattcagcttttgaaatattgctattgatgcacaacaaaaaacaaagcaatcctggcttgacattttcaaacagttacattgaaaggctttcacttctaattgatttttaaaagagttccctggaaaagtgagctcagaaatgtttataacagttttggcaatgtcccaaaaagcttacccaaagcataattcagcactttctgagatcgtctctgaactaaaaaagatgtgtcccataattggcttaatatatactgatgctgaattctctccacagacatcatatttaagacataaattatcaaaatgattacttccaaatacagagaaatttacttctgctaaacatgaaaaaacggtcagaatattattgattggcaaatgatatattgcattttttctgaagtaacattttctctctcgtttctagggctttagaaactacttagtgaggataacaaaaagtttacatgtttttgttaggttgatagcagaactacttttgtccaagtgtgaaaacctaccccagacagctgaaataagtggatataccatcaactctctattaacaagcatgcagactgaaatacaaccaacattggccacagcaattcttttaaaaggctccagcttagtatttcagaaaaaaaaatttcattgacaatgtttgtcaattcctgtgctttttttattgattgcttttggctgtatggtctcatgattgatgatgtatctgcttactctgggtgataagagatcaatttacacaccaaacagataaacatgcactgtttaggtttctactctgtaataatattagtttagacatcatgtgtttcttggaaactacagctcagagtagtgaaaaacttcattttattcttcttgatattgtgaggttttatgtgtgctggtttctcaagcatgattaggttcaataatgtgatttttaaagtatgactagccagaatgaatcatttacttgtaagctttttattcctgggatgaagactagtacaattgcataacatctaaatattccctcaggaattcagaatggctgtggtttgaaattcctgtgctgtaaactcctgcagtgcaggcaggtttacatttattcaataataaaccaactctatataagtcactaatgttatgaaacagagatgcctgaaatgacaaaggaaaacaaattaatagaccaaaaaaagaaaagatacagaagtaaccaggtagtagtattgtttagtttgtcaagataaggcaatatctaattcatgttgctttagagaattaaatttgccaaaaaataatcattttctactaaaatttgatctgttttcatttaaatttgaacagtaaactttaattaggagatcatatgatggcatctttagttttatgtctctctctctttcattgtctgtcacattatgaccttcgcactacccagagtccagtgttttatttattcattatttcttcttaaactgtctgaaaactgaatgtcctttttattttattatagcacactctttctttgcaggtctattagtctcaatgtcttccccacatctacgcaccagtgttcaccaactccctttgctctcatcctcaggttctctaaaagttcttagtgctctataatgcttccttgctgttcccttactggaatctttgagagagacatcagaagaaagaaggagaaaaaagagaaagtgaaaaagaggagaggggcaagctgtggaccatttaattttcacatattttaagagatcaataatcagccaataaacctttaactgaaaagttttgtcacatttcaggttatcacacaatatgcacacttcgactctagcagtacacattactttattcagtgcacataatacctcctttaattagcccttaataagcttggtttaactgggatttaccagagaacagtggtcattaacattacccagattaagactgtgttaattactattgatagataaaataacgtgcaaaacggtataaactatttttatctttatgaactgaaagaaaatctgaagcgtttaagtgaaagtagtaatttattcatacataaattgaacattaccttatgtggaagtagacataccaagtaggaaggaacctgtgtcataatttacattttatagcttccttaattttactgtgaataaaaccatcaccaaaggatttctatgatttctaggtggagatttttacatttactttgtcatttatgttatagaatctcactcagaaacaaagataccttgactaaagcatacattcaaaatattgcctgggtaacaactaatatatctcattgttattgaaagatattttgtagtggctatcactattatattcatgatatgttttaacattatttctaaatatggtatttatgttcctaatcataagtagcttgaaaaaatgaaattttgctgttttcccctctgcatgctttctttgccccgactcaattctcccaagcccatatccatctttgtgtaggtcttctagcataattatatttattgaattaacattatttatcacaggaaaactactcatcaattctagattgagaataccaatgaaattcttatactttccagtcttcataagttttggcagtttgtttattatggaatcattatacgatttccactcttaaaaaaatcagacaaaaatctaagtttctaggaaaaataaattataaaaatgcgtcatattctgtgatagactgcaacattgtctcgtcttttctgagctcgtcttttctggtttggtttgggttgggtaatttggttctccgtctaggcaagtttaccttagttatttaaagaaaaccttgatgtcttctatttcataccacccattctatttgtgatacccatcaaaatttataagtaatagcctttttctgtgagtctttctgtctcaaggttgttcttcccccttaccccctcccccgaatcgttggctactggatggaggccaatcctgcccacatagatggtgaatggctgatgtgtggctgtccaccaaatcctcctgaatgattgcttatggagaatgtcctcagttagaaagaaggtcttttatgcactatccctggcatactctcatgtctaaaaattcctctgttatcttcctaaatcatctattatttttccactccaagctacactttgttcagtgtcagcattctggggttttattgtgtaatgttttaattctcatttttctgagagcacaggtccatatctacttactgacttcatttaatctgaagcataaactgttgatattgttgacaattccattttacagatgaataaattgaaactccgaagaagttatttcatcataaccttacgtggattttattttattttattttattttattttattttattttattttattttattttattttatttggtagaaaaattcggaaaggctttgcctgctggactctcactttagtgatggttaaaaggaagaagaatgatcccatttcaggaatactaaagctatcagatctgacactgaaaattttgccaaaagttattttgggaacccagaaaaaagaggtataaactttagtcatattttactattaggttaaatgccaggtttggaatgatgttacccattcatccaattcagtgatctataatacagtataccatttgtgaattatatgtttaggtcatttaacctacctccctagcactttgtaggagtgggatatgactgcagcgttccaggggaatatatagacatctctgagcacaatttccaacactgcagacaaagtgaaaacgcaacgcgtctgcacaacattaagtttattatttatcattctgcttttatattcctgctcagtaaattactctacaactttaaaatgaaaaagaatcttttgtggccatatccctgtttaatatctgtgttttatccatttgcttatgattttttaccagataatacacgttctctgtatctaagctgttttgcacggtacgctccttggacggcactataaaccctttgtggcagggaccttgtctttttatatgctctataaagcaccatgcatacctggggaattttatgaataataataaaaaggagacgaaaggagccttcatcagcaatgttttactttgcatgtgaatttagggatgaatttctgctgttgcccataattctgaagaaacagctgcttgtattagagagtttgactctgaagaatacatgtaatattaaatctgaaaatttacattgttggtataggaaaactaaacgaggcaatacaatttgcttttcctatccattatgaaaatattgctaagtctgacatgtggttcataaactcaaagatttttctaacacagctgtgcaggagcaaatgaaatactgcaggtataggaaaccacctgtttgccagagcaggattttcaaaacagatacacactgggattttatatggatctccgcagtgcatatattctgctactaatgctaaaccctttatacttgttcttcgaacaggtgttctccaagggaacaatggtttgattagtttatggctcattcacactgttggtttccctaatcagtatacaggagtgccttgaagagaactgtcacacataggtttgcaaccaattcaattttaaaagccagagatatcaccaaccacaaattcttactcactccgaacctctcctttctcatctttatcttgttcacaaaactcatgaaaaataacagtgttttaccatgatgagaagatctgaaatacgccataaatcataccgagttaccagagaaattcaaattgctgtaagcacaagtgccaagggactgcttatacacagcctgagccataatgcaatgctcagaagatcattgtatcataatctcattctgactgcgatttgccttgtgtgtaggggctctggtgtcagggagagagagaggaaaaaccaaactggcaacttaggcttctcttctactttgcatttagccagtgattagacaaacagattcatcagaggccttgcaggtcggaaggtagtaagtagttcttgaacgatgtctttgtattaaatagctctgggtatgtcacacatagttatatttctatacaagaatatctggagagaatttaggaaacattaaaatttgcattgtaatcttcattaagggatgatatcaagaaactaaaatcatatcccaagcacaaaacaaaagtatgtactgaaccaacaaccccgatcatatttcaagttggaataaaatgtatatttttaagatttcataaaattgaaattctgttaaaactataaacctttgtattatgtcaatacattgaaatgtctccaagcttgtggcccttttaaccaactccttctacataagttgttaatataaacttgtgaagttgtcaagacaaaagtcaacttctaaagtcattaacttgtcaatcttgtttgtaagacatataagaaggtttaaaggagtctgttccgtccagtcgtccatgagcactaaaggaacatggttcgagttctagaatgtggccagcaatagtaaagaaagatgacatgtgcgtttttatgtgtttgctcaagcaactgtgtgtatgtgtgtgtgtgtgcagatgtgcatgtgtgttcacatgtgtgtgtgtgtatgtgagcgtgtgtgtgcagatgtgcatgtgtgttcacatgtgtgtgtgtgtgtgtgtgtatgtgtgtgaattaaaaatgttaatatgctgccattacggcaaaatatgtaagatgaaattgaaatagatgacagaattttgttctattttcttttgttatgttcagaacactgtgaaagcataaccagtcctcaaaactaaagtttgtagaggctgacatctttactactactactactactattattattattatttaatatttttttcagtccagtcattatccccctccaggtcagacctctgactgttcctcaccctactcttccttccctgcctccaagaggatgtctccaccccacctgcactccaccagaccttcctgcggcctggggtctcaagtctctctagagttgggtacatctaactataatatataagcatgatagttacatataactttatttttccttttttttaggtatttatttcatttacatttccaatgctatcccaaaagtccaccacccgctcgctcccccacccacccactcccacttcttggccctggccttcacctgtactggggcatataaagtttgcataaccaatgggcctctctttccactgatggccgactaggccatcttctgattcatatgcagctagagacatgagctcctggggttactggtcagttcatattgttgttccacctatagggttgcagatccctttagctccttggctactttctctagctcctccattgggggccctgtggtccatccaagagctgactgtgagcatccacttctgtgtttgctaggccacggcatagtctcacaagagagagctatatctgggtcctttcagcataatcttgctagtgtatgcaatggtgtcaggatttggaagctgattatgggatggatacctggatatggcagtctctagatggtccatcctttcatctcagctccaaactttgtctctgtaactccttccatgggtgttttgttcccacttctaaggaggggcatagtgtccacacttcagtcttcattcttcttgcgtttcatgcatttagcaaattgtatcttctatcttgggtatcctaagtttctgggctaatatccacttatcagtgagtacatattgtgtgagttcctttgtgattgggttacctcactcaggacgatgcccttcaggtccatccatttgcctaggaatttcataaattcattctttttaatagctgagtagtactcatttgtgtaaatgtaccacattttctgtatccattcctctgttgaggggcatctgggttctttccagcttctggctattataaataaggctgctatgaacatagtggaacatgtgtccttcttaccagttggaacatcttctggatataggcccaggagaggtattgcgggatcctctggtagtactatgtccaattttctgaggaactgccagactgatttccagagttgttgtacaagctttcaatcccactaacaatgaaggagtgttcctctttctccacatcctcgccagcatctgctgtcacctgaatttttgatcttagccattctgactggtgtgaggtggaatctcagggttgttttgatttgcatttccctgatgattaaggatgttgaacattttttcaggtgcttttctgccattcggtattcctcaggtgagaattctttgttcagttctgagccccattttttaatggggttatttgattttccggagtccaccttcttaagttctttatatatattggatattagtcccctatctgatttgggataggtaaagatcctttcccaatctgttggtggtctttttgccttattgacggtgtcttttgccttgcagaagctttggagtttcatgaggtcccatttgtcaattctctatcttacagcacaagccattgctgttctatttaggaattttccccctgtacccatatcttcgaggcttttccctactttctcctctataagtttcagtgtctctggttttatgtggagttccttaatccacttagatttgaccttagtacaaggagatagaaatggatcaattcataatcttctacatgataacagccagttgtgccagcaccatttgttgaaaatgctgtctcttttccactggatggttttagctcccttgtcaaagatcaagtgaccataggtgtgtgggttcatttctgggtcttcaattctattccattggtctacttgtctgtctctataccagtaccatgcagtttttatcacacttgctctgtagtacagcttaggtcaggcatggagattccaccagaggttttttttttttaatcctcataatccactatataaacaaactcaaagacaaaaactacatgatcatctcgttagatacagagaaagcatttgacaaaatccaacacccattcatgataaaagtcttggatcaggaattcaaggaccatacctaaacatgataaaagcaatctacagcaaaccaggagccaacatcaaagtaaatgttgagaagctggaagcaatcccactaaaatcagggactagacaaggctgttcactctagccctacctattcaacattgtacttgatgtcctagccagagcaattcgacaacaaaaggatatcaaggggatacaaattagaaaggaagaagtaaaaatatcacttttttgcagatgatatgatagtatatataagtgaccctaaaaattccaccagagatctcctaagcctgataaacagcttcaatcaagtagctggatataaaattaactcaaagaagtcaatggcctttctgtacacaaaggataaacaggctgagaaagaaattagggaaacaacacccttctcaataatcacaaataatataaaataccttggccttggcgtgactctaactaaggaagtgaaagatcggtatgataagaacttcaagtctctgatgaaagaaattaaggaagatctcagaagatggaaagatctcccatgctcatggattggcagggttgatatagtaaaaatggctatcttgccaaaagcaatctacagattcaatgcaatccccatcaaatttccaagtcagttcttcaacgaattagaaagggcaatctgcaaattcatctggaataacaaaaaacctaggatagcaaaaactcttctcaagcatgcttatatttttgattcagtctttttctctcttttaaaactggtggctgaaatgaatttccttagtatacattgaaaatagacagtttcaatccttatggctttgtaactgtctcaactctcatattaagttcatagcatataaagtaaaatgttctatatgctatggtagtgaatctgtacactggaatttgaaaggagaatttaacaaatagaagaaatgcaaagtaaggaatacattatcatattgtgaaaaaaagttatgcaggtgaacacttggttattataagtataaaaaatagtatgaataaatctatgaaaagctcttttggagcaattatttcctataatgtgtaatttgccctgccccttctgtttatttgaattttaatatgaaagaaatgattatctctttttatttgaaattggtgcaaaggtaaagccacaagccttttgaaagaatccctttgttcccagttacatgagtgttattggaacaaaactttaccacctgccaaaggctttaaaacctaaatcaaaaggttccctgcttcaaaacactgaaactaaaggtgtgggcttcaggatgaaaatgtaatgacttgatcactctcattccacattgattattgtatggcagaattgatggattatgtaatttttcaacagactctaattcgtaaatgaaaatgagcaaagaggaatcaccagatatccataattgtctgtattattgaagaaactagaattgggttctaagagttatagaatttcactcatttttatttatttatttatttatttatttatttatttatttatttatttatttatttatttatttaaacctctcaaaagggaaagagggaaaaaaggggcgaagtagttctcacagtagttaaaacaatccatggattccatgcctcatttactgtttgcattcaagacaaaagtggattctgatgaagtggaaaaccaacttgggaccaattttccacaacataaattcaacaccctttctacctcttgatcctctgtattcagacttccgagaaggctcatcacatatgccgcacccgtcatcattttagtcctccttttggatcctccaatccttaaaagcactgtgctttcacctcagatgctgaaattaatttatcaataatttcattacggaactgatatagcaacgagccccccctttgtttgtttgtttgtttgttttggtaagaaacatccaactattcaaatagataatttaaacataatctcatttacatttgattttttatctccaaattcttgtgtttattttaatatcgtattaaaattgtcatatgattcatctcaggaaatacattcccaaattaataacaaatagagtaaaaataagtcttgtaacataactatgtatatacattacacaaggctttctcatggcagaaagacatgaataaggtcaaagctaattttttaattttctacttacaagcttaaaatactggaatgccatatatgtcttttgaaacagtcttttaggttacagtagtattcaatgatagtaattaggtggtgtcttctatagatgaagacctagcaagtaaataacttcactgccactcaggaccagccagtgtgagcttgctctgaccatacaccagttcaagtgatttgaagttagctgctagtaattaaggaaatatagagtttttttttctttctgtggttccagtgctatccattaaactggttttaatttatgaaacctcatggttactggaaatagtaggctctgaaatctttattcttgtcaaaacaatgcataggagtttcttcaaatgagaaagggcccattgttagagggcaccattttgtacttgttcctttgcctataaaataggacaattcttgaagaattgtgaagaagttgcctgattccttttcatgtttctgttagcatatggtttattttaattcagtagataactgcacctgttgattcaagatttagtaaatattttgtggcatgtgcttaaagtttttgtatgccagaactaggaatgggagtgggtgggttgggaatcagggggagggggaagggatagggtatttttggagggaaaagtaggaaagaggataacatttaaaatgtaaataaagaaaatatctaataaaatatttaaaaaatgtaatgacaaataaactagatgcacacaagacaacttcaatttccattttactattcattaaccagtgacaaactctagcagtagtaaaaaaaaaaaatcattctaccatacagatgatatccctgtatctcttcctctgacccaatcagccacaataatctaatctagaagaaaacacctgggaggtgtcttctcagaaagtatttcaatattttccaggttattctcacatcatcttttgaaaatatggataagccttgatttttcatcagaatacatgaataataagctgtaatggacatctgatgtgcattggactgtgtgtcagacatgaagtttactttaaagaacaaactttgatggcgatgtttctaacataaaagtacttttccttaatagataccttgtgtgaaatatcatattagaacacccttttaaatgtaacatgcagtttttatttttgtttttgagattttaatataattgctgcatcactctgtccccctttctcgcgccaaagcatcccatgtcctcctgctgaatctctctcgaatccatggccttttccttcataaaattttatatgagatttgcaccaataaaacccttatttcatcaaagattttacatatgccttaagaagatggaattccttagcttaggttgttggcattctgtggtgttccttattttcctaaaacaaatgctgaggtgacgcctggctcagtcagtcaatgcacacatttagcacaccccaggagggaagctgtgtggtgaacccagtagattttagagctcagaaaggcttcacaccctgtggtgccagcacacttctttcactgggaagtttgtcattaaaatatagccctcttacagtgacttcaaactagcttgatttgaattgtttttagttacaatgcagcacgaggaatattttcagtttggaaaaaagaaaaaggaagaaagaaagaaaaaaagaaaagaaaagaaaagaatccataaggattattttattttgatagatacaatctatccatgtagtatatataactacactgtatctgtgtacttatgtgtagctatatatttataaaaataatcaaaactcacttatagatgaaaatgtataaaagaaaatctgatgttaactttctagcaactgaaatattcaaacaaatagataagagtggctatgcattaaaagaaaacacatgatgaagcaaagtatagcttattaattatgaggcattcaaatcatttttcgcattatagaatcatgttccccatgaaaacattgtgtattttattattaactcacagcatatgatcttcatttctgcctccctcaatttcgtccccctgggatggaacaacgtagactcacacatttattatattaattagaaatcactacctaatataattattctggcaagcacatggtgagtcctgaaatattattgacagaatttctctatttaactctggtgttaaaaagatttgcatgtctaaaactgccttgattagatattgtttttgacgactctgcgtggtgttttcctcgatgcacattaagcacgaggacttttagcacgtctgaagtaacatctgctccgtctttttgttgcagggttcatggtataattagctctatatttcagcaaatacaattttgctcccatggaggacaaagcagcatgaagaaaacataaataattgcagattagagaaacagaagtcaaagtgggtgtagatggctttgataaaaaagggttaaagaatagaaggtcacctcattattaagacaaaaaggaggcagttaaaattagatatggtctttgtaattaaagaaaacacacactgattttttccccctttaacaatgttcccgtttgggcaaataatttagtgatttgcaatgatgtagtttcttttgtgtttatttaggatacactttaaacattttgaatgacttgatacattagggaaaattaagtttcagggggatagactgaaaacaaataggagattttatattatttctcagaacataaagaaagtctgttttgtaccatttataatgttatcagatgtttccacttatctagatagctagatgttcttatatcaagagatttcccttcatcaatgtatttacatgaccgaattgtattcccttaatattgacttcattgcaatatgccaaaattttgcaatattaaatacttaggtcatctgttaatttttaacattacacaagttaataaaaatatttcatagcccccgtgaatattcagagtctagtaataatatagcataatttgccaaattatttataatatatattgtaatttacaaattgccaaatgaccattgttgacattagctacatagttacacaaatataaatttccccaccatttacttccagagtacaaactataagacctcagtgagtgatggttgagtggctctgagtgccttactgtgtatgactctaggtgcaatcctcagcctgctctccattcgaaaacacacacgttgacataacactgggcccctctatgtttctgtctgtttaaacccctaagaacttgttgaagcaaagggatagcgttttggtttgattttctttatgaaaaaggtaggtgattgatttattcttaaagatgtgtcctagtggtataaaaccagtgaaaacacagaaaacttccactgtcactagaattgacatcaacaaaaatgaacacataacaaattaaaagcatgaatccagacaaaagctgtaacgattaagtgtgctgtcatgaagaaggactgtttaaaagatgctataaggcaaatatgaataaaaacaattttagcaatgtttattttatttttcccttttcttttaaaattccacctgtatatatataaaagaatatttctgatatctacccatcccctctccaccctctcgagtctccttggttnnnnnnnnnnnnnnnnnnnnaaaaatgaacacataacaaattaaaagcatgaatccagacaaaagctgtaacgattaagtgtgctgtcatgaagaaggactgtttaaaagatgctataaggcaaatatgaataaaaacaattttagcaatgtttattttatttttcccttttcttttaaaattccacctgtatatatatatatatatatatatacatatatatatatatatatgaatatttctgatatctatccatcccccctccaccctctcgagtctccttggttccctcacagcatatctccttagcatatctccttttcaacctcattttcttttctttttctttgtttctatgtctttattaacttactcactttacattcagaatgcatgcctcatcatctcctcacaaagtctctacccctacccctcttccacttctctttacgtcttagaagtgggtggtcctttctgggaaacccaccaaactgacacctctagtcactgcaggactagacatattttctcctactgaggccagaaaagacaactgagctgggaagcaggatccagataacagaggcaggtaacagattcaggctaagacccttatcctgttgttggggtatctgcaagaagaccaagctgcatatctgccacatatgtgtggtccagcccatacttgatctttgattgacagttcattctctaagaacccctaagggtccaggttagttgactctgttgatcttcttgtggagccagtatcccctcaggaatcttgtttctcaagaactcttctcaataatcaacaacatgtgtttcgtggtaaataattggatatttaaagagtgattctcacgtagttgaggatatgcaacctgaagtggccacctcctgtagccaggcaggacttccattggaggaataatgacaccaacccacccagaaaaccttccacccaaatttgtcctgcctacaagacgcgcagggtaaaagctgtagcagagattgtgagaatagacaagcaatgactgatccaagagatccatcccatgagcaagaaccaatccctgacactattagtgatactctgtttggttgcagaccggagtctaacattaactgtcctctgagagacttcacccaagagctgacccaaacagatgcaagggacccagagtcaatcaacagagggaagtggggaagtctagtggaggctgtgagggaagggtcaaggcactggtgctcatttcccaaccgattaaatctatttagttctgttcacacattaacaggtgtgtgctcatccactgagtcatagaccagccttcaaagtaaatgaatctcacccctacagcaacctttagctagcagaaacttctcagctagagatgagactactgaggcttctacctcctccctgtaggaatcttacctatgggaatcttgtacagatgatgtgtcagaaactacagctcctctgagtccctgtgagcaaaagacttgtcatatttagaagacataattttacaacttttctccccatcaactggcttatatgttctctcttctgttttctgtaatgtgtcccgagctttagggaggccgtgtagcattgtattctctgtcctgtccatgggtgaccactcccattcacttactgttgacacttgaacggttctgagtctctgttttaatcacaacccatggcagaatgaattggctcgggttagatgtgagatcagcacaaatctatggatttgtgtagacatacatatttagaactcagtttgagaatatgaacacatagttgtgaaattcacctaattgatcataatattggtacatatgaagtcagaaccttgcttcttgatttcagtagcagattgtggcaagtgtaagatattcattctgctttcaaattccagatattttgtatgtatattaatcacaagcattctcgagttatacattgcttctctaaattttcttgtgtttgtgtatgaagtattacaagaaaagaaaatttatttttgtatatctgtaaacaatatgtttaatattaatttaatgattagggaatcaatgagactgttattaactgttgccgtgttaatattgttactaattcaaagtagatgcactaaaagtcaggtagtcatgtgtcattcataggaaatagaatctgtttaattatgtgaatacatagttgtacactaggagagattttcatattaatttacgttggctctgtaattacaattcaagatatgtaaatggttttggatgtgttttaaaattcttagatgatgcacaagtggatgaaatacacccattttctttccagattaattctcttcttcaacagcttcatacaggtgtgtgatgctttctgctcattctcaccatcctcttgtctctcctacctctgccacatcctccagtctctctatgatcagaggaaaaggttgtgtcaatctcccattcttgacagctcagaagttgttgaactgttgtataaattacaaatttgcatcatcctcaaattgcagtacacttaaaaagtttcatttctaatttattttatttatctacacgctttaataggtgggaaaatcttagtggttttttttttctgcagtggtatgacattgttttcaatgtgtgaatacagtaattctcttgtttagatacaattcattttagaaataaagcattttttaatttagataatcaacatgaagctcaaatttataataatattattaaattttggatttttatcattagttttttgtgtacaatagaattttgtggattaaaatcatcctttgagctacagaaaatagataacatcttccataacaaaaaggaatttttaaaagtttggaagctgcccgtactttgagaaggatctgtgtgaatgaatagaaaaagaagttctgtcgaggctatttttcttctgagtgtgaaatagtgacaaacttctgctacttgagactatcataattttcactaccactgaaagaaacactctactcaccccaaagttgactgattgatatgggtttgctatttccatgtgtgataaagggtagttcaagttgaaaaaaaagctgagaatattaacacattatggcaggtatacactgtattaaacagattagaacactgaaaacttagtcatgacactatttaacattatctggggaagatatttgttatggaaatactttgtaagccgttgtataattcttttacacagacattcacacatacattagaagaagaaacataaatacctttctgctcatcatttccaacatatcaaaatattgattttattatccagtttctgattttaggttttcatagacttggttgttatattgtacccacaggatttgagtatttactatagaaaagtccttcagtttacaagtgtgaagttattctattcaacagtgtagaaaagacaaaatgatggcccctacataaaagtaaatgaaggcaccaggtgaccgaataaactcttggagataaagactttccacaggttcacttatgtgttgtgattactgactgttcaccgaggtgagttgaagatttgggtggagatatttttacaccagtgtttctttttgtgaaacagtgtaataatatccatttaatcctgagagtcagtggtagatcttttgaataaatctatacagtccattcagttgctcctgcttcttcagctctacatctttatatttagctcatcaagaatataaagtatatatttttaaaaatttatattatttttatgtgtaagagtgtttgccaacattgttgtctatgtgtgcccataccattggaagtcaaaagaggccattgtatcatctggaactgggatgagagatggctctagtctattatgtgggttctgggaaccaaatctgtattctttaaagaaaaaaaaaaaccagaaaatattctaaattgttgagtcatcacttaatttttttgaaaacagttcaagagtgagtcctcaccaaaagtatatatttttattataattattctctcaataataaatacctactagtaatcaggctatatgaaaacagtatatccatttttactctgggcaagaacatctatgatgtttagtgttccataaggtttctgtaaccagttcctcagatgctgaaggtccacattaaatttaaatgcagtgacaactttgtccaaagtcatcttagagtattacatgaactttcctgtatgcctaccttaagtacttaatgtctctgtaaatacaatagttgtaagattattcacccataaacatttcactcattttttgtccttttgcatacttgaacattttgtcctctgactgatatgtgatttatccatcgttaaccaacattttcaaggtttcattttttgtcatgactcccttcacttgcataggcaccaatctacaaatacttagttcatagctctaaaataacaaataaaattgtaactctactacatcataacaacaaaatctaagtacatgaatactaggttttattgtgttattgcattgagcttcataaattgataatctaatttcaacctttcttttttggagcttcttccttaaaagtcacatatatttccagtaaacttactaaaacatatttaagccattttgtgaatactgtgcatatgtgacaaatattcctactttgctaaatagtccttaaagtgtgtacataagtatttttccaagtttctcatctgaggatgctatctataccaccatgttgtctgtgtgtacatggttcatagcatgttcatagcttgatactaaaattccaacatgttcatgaatgtagagtgttaacgaatgagaacagcattttatgaaaattgctcagtttgttgtagtttcattactcaggccaacaagatgcctgttgtttaaaatgggtaaacatcttggcactcaaataccatgtgtacaaaagctttacatgtttcttccctgtatgatcttctgctgaaaatattgtatggggtttctattctgtttccatacgtcctctcatctgctgttccatagccaaagtagtcagcacacggaaaaagacactcactcattggtttataactttccaagcttttagaggaaaaacaagaaaaatcctctcatactcctaattaggagtccacactattcctcatttcttctccttgctatcttcttcctcatccatattcactcttactaattctaaccaacacacatcacaaatgtggctgctcttaggtctctatcttctatcctcctttgagcaagtcccttgcccagatggccatttcctttattttctccaaatgctcttttcttattaatgttgatatttaacaaatctatatttttccacagtgtttttcctcaatgcacatttttcctttttatttttcccacagtgatcagtaaaattctggcaagccaagactttacctacgttatactatataatactattcataagtctcagaatgtgagctgtataattctagggtcttcctgactttttgtttacttcactcaactctaatttgactgtctagaacgctaactcaaactgcctttgctgaagtaacaaatttaatctacgcattgacacacacgtttggcacaataaacaaaaaaaaaacaatcctgtcaaatagatttaaattggcagaactatggacatattgtgatgtttaatgaatgtattgataggtggtagctcagtctgtaaggggcttgcttttaaagagtaatgactcaagttacagaacaagaacagcaacaaccaaaacacaaaaacagcaatggtatgggtattgttaatgtatattcctcatccagtgctgggaagacaaaaacaaaatcaggtgggtctgaggcttcttggattggctacttagctagttcaaagcaatgggagacccattctcttaaaaacaagataactatcacctgtgtaatgacagctgatgatatcctctaacctctgtatgcacacaggaacacactccagtgcaccacacaaaacattaccatttggtcaacgatggtcaaaggggaaaaaaaaagtccttaaaattctatatactgaagactaaaaatgaaagagttaaaacgtgttttcctaatgtgacatgctctgagagccacagaccacttcaactcatgtttatacattatgccactataactgcttaaagtgtagagatttttaattgaattttatggctggtctacattgtagatagtaatttttacgttatagcttatgcgattagtcatagaagatacagagaaatttccattgatgtaataaaatatcaataaaatcaaaatggtgtttcttgagtagttagtgatcttatgtatcactaaatctctgagcgtgcaattagatataaatgcactttcaaaatgaatatctagtaatttcaatagttttttttttaaataacaagcatcagtgataaaggactagacatgttaaattatatgtatttcaacacattattttgcccttaaaactgtgaatattaatgcattcataaatacactcccatgagttcctaaacattcctttttataatagatattcaaaatctgggctataaacactatcccgaaatatatttaattggggggggggaaactttaacatttcatgtcatatatttaaattattttaaaataggctttctgttttcacgtgtcgttttgtcatttaataatatttaagtagccaataggattcattttgaaattatatcatatccctctactaatcaagcacttaatttcaatagtgaagagtttattattcttaggtacatacataattgaagagtatcaaaaatcacaattgttgttcagatcaagagtgagtccaaaatgagtccctcatttattcacttaccatatttttttaacatttactagcagtgtgtcacaggaattgtttataaaaagttgtatagttctgttacacttgacctttaaaaattgtttgagaattaatacttgatgcctcaaaacatacataatcttgctatttcctttacatctaaatattctctaaaaacataattttcctgaattttaagtggataacattaatttgacattttcagcctccaaattaaattttttatgcttgtcttgaatgtgcctgggaaacaagaaatgaaattttgacagaaataaaaatgtcactgggaatattattgactaccttgaattgtgctccatttaccacttaaacattattgtataagtcatccagaaacagttctggatctattcttttaatcattgataggtcattgatctgtttcagatggctattcaattttagaacatagagtactaggcatgatggattttctagaaatcagaccatcaaaaaaattcaaaaatatattaatacctgtgggttataaaaaatacaaaaaccttattttaatgatcatcctgtcaaaagaaaggtatttccttctttctttattgctaataggaatataaagaaaccacaatgctctttctcttacaccagtttaaattcaggctttcatcaattgatattgtaaactcagatttttttcttattctttggtaatgtggtttttgaactgtttatattcatatttataaaaatctagacagctcacatgaaattttgtgttatattatagtttatatcaatgtttcttatattttatttcctccatttttactgctgattctatgattaactattttagatcttactgaattaaagcaaggcaatatagcatttggagaatatttctattttccattttaaaaattcagacgactataaagctatttctggtatttaggcattcctgatttcaacctatatatctgttttcttttatacttctgattatacttctttaacttttaatttcattgcattgtattgtatgttatttatatattgcccctttaaggacttatgtatgacaaagaataataatttccttttggtaactttaaagtgtctaaattggcatggtaaaatctctcttattttgttgcctctttttctcttcttgtcagtttcatggtgatagaaagtttatgggtactcatcatctgtcagtgtgataaattgctgtctcatacagagagtctttaaaaacatatccctaccatctccgaattatctcaatacatttaatcataaccttgacttccgattcataataattggtttttcataagttgtcaaaatcaaggttctttatgtttcttgtacataatcgcaatatgatttttaaaaatataaataaatggaattttccagatgtttggggtacataggaacgctttatctttagactacaaagaaaacatttaaattcccatctaaatttgacttactgttaaagtttgtcagttaacttttaaggtaaaacacacacacacacacacacacacacagagagagagagagagagagagagagagagagagagagagagagagagagagagttttgaatattgaactgagagtttgaatactttcaatcaagcatatgaaagtagattttaagttctataattttattttttattaatcattttattcatttacatttccaatgatatccccctccccggataccaattgatgaccccctcccatcccattgactcttcactcccccttccatttgcgtctctgagggttcttcttcacccactcacccacctctgcctcaccactctagcatccctctacacaggggcatcaagcctctagaggaccaaagtgctcccctccctttgatgtcagataaggcaatcctctgctaaatatgtttctggagtcaagtatacatctttttggtggattagtctctgggggttctgggtggtccagttagttgatattcttctacctaaaaggttgcaatatccttcagttccttaagggtcttccctagattttccattggggtccccaggctcagtacaatggttggctgtgagtatctgcatctgcatgggtcagatgctggtaaagcctctcagggaacagccataccagggtactgtcagcaagtgcttcttggcatcagcaatagtgtgggtgttaggtgtctgcaaatgggatggatccctaggtggatcaatctctggatagcttttccttcagtctctgttccattttttgttcctgtctttcatttggacaggaacatttatgggttaaaaattttgagatcaataggtggctccatccttcaactatgggcagtgcctatctactagaggtggcctctaaagattttatctcccctttgttgcatatttcagctaaagttatcactgttgggttctgggagcctctctcttcactggcatttgggactttctagtggctacctacatttcctcattccccagtgctacatacttttattcgatttcctgacactccgtacttctcccctgtcccttctaatacttgatcctgtactctctccccacccttctcttttcctctcctgtcccttcctccctgtacctcctgtgattattttgttccaccttctatgttggattgaagaatccatactttggtcttccttcttaaactccatatggtttgtgggttgtattgtgggtattctgagatttttgcgcaatatccacttatcagtaggtacataccatgtgtattcttttgtatctgggttacctcactcaggatgatattttcgagttccattcatttgcctgtgaatttcctgaagtcattgtttttaatagttgagtagtactcaattgtgtaaatgtaccactttttttttaatccattcctctgttgagggacatctgggttctttccagcttctggatattataaataaggctgctatgaacatagtggaacatttatcttgtcatatgttggaacatcttttggatatatgctcaggagtggtatagctgggtcctcaggtaatactgtgtccaatattctgtgaaaccaccagacttatttccagagtgcttgtatcagctttcaatcccacgagaaatggaagaatgttcctccttttccacatcctgaccagcacctgctgtcacctgagtttttgatcttagccattctgatttgtagaaggtggactctcagagttgttttgatttacatttccctgatgaataaggatgttgaacatttctttaactgcatttaagccattcaagatttctcagttgaaaattatttttttagctctgtaccccatttttaatagggttatttgattaacttctggagttctttttagattttggatattagccctctatcagatgtagggttgattaaactcttttcctaatcagttggttgctattttgtcttattgacagtgttctttgccttacagaagctttgcaattttatgaggtcctatttgtagattgttgatcttagagcatgagccattggtattctgttcaggaaaatttcccctgtgctgatgtgtttgaagctcattcttactttctcttctattagattcaatgtatctggttttatgtggaggtccttgatccaacattgctgttattatacaattctatagtatgaactacaaccgtggatttcaattcagtatttgaatttcatttctgtttttaatgctctctactgaagggccttcaatggcttatagtcactgttgaccatgaacaagtgacaccaatgtgacactctcaggaggttaagccatgaaagtaattaaaaacaattttaaaaattatgttaatttaaaaattattatttgataatgtttatttccatactcttgaattgcgtatctgggatgttaatattttatacttttaatgcatctcattgaacaaatttaatatttaaatagatttccctatgcaaggctttctagttcattctgaatttcaaggtgattatgaaaccaaacaaccaaccacaacatcaaaactcaatcatgcctctaaaaatgctccacaactgttattcaaatagtatcctatgtaacaacattacaatagaagttgatgttatattcagagaaacccaagcttttctactttgaagtaagttagttctatattatatgataatgcataaatcatacaaattgctcacagacttttcatcttactacacaaaataggttgcatgcaatttctttagatatcaactttctacacatctaaaaatcatagtagaatgattcttcatggttttcaagactttttatttgagcctcttctataattatgataaagggacttgacatttgctgacattaaatgttgtctttgtgtgtatgtgggtgtgtatgtctgtgtgtgcttgtgtgtgtaataactttcaattctctttttatatgagaaatcagagtttagtatgtgtttgtagtgcaaaatcatgtctgtgactaaccagaagaccagagatgatgtttgctttatattaattttctcctctttagatgtccatggaggacgtttcaaaaatttatgtgtagcataaacacttcttttagttaattgtagaagtttaacactcaaagtctttacagccccctaggtgtagttgaagatttacatattaaacagagatgctctctgacatggatttataaaatgatgcttgtttatgataactttagcataaatataagaatttcctattcgtagatggaaaagtgaagccactgaggatgaagatcatgacaagatgaaaagaaatccattaattatactaaattgacgaattttgctctactcagagcctgagatgaattatgctcagtgaagctcttacttgaagtttatatcaatatgatgacatttttagatttgtaattagtttcttgattatttcaggttttctgatgtgtgtcaaatattaaagaagttagaacaaaattttcacaccgatttaaagaactctgtaacaatgttatcacttttatcatgattaacttcattttcagagccaactcatgatttacacaagataagtctgtaatttaacttaatgcaaatgatttagtcatctatttattatatgcactaaaatgtattcttttaaaaatgcagtcaatagaaagcaggagagaaacaatcttggatgatatttaaagctactatagaataattgccaatattttccaattgatatttttctttccatgtgcatttttaaagatacttaaagcgtgctccaaaattagacctgacaattgcaaatgccaaccaaccaactcagtaataaaatcaatacttacatttccctggaggccactatttactgtttggtgcaccgtttccttaatggaatggcagttaggtttgcagaggctttgtagttactgtttttttgtgttttaactaaaagtagcttttttgaagaagaagaataaaaaatttcttgttactattaaaattgttaagaccttctcatatttaatataagtggaaagaatatatttattctgtacacacacacatgcacatacatgcacacacacattcttaaatacacatggacataaacatgcttcctctataacaacataacatatatatataacatatacataggtagtgacatttgctgataatggcgtatgaacctgatagttaaagattttacaatattaaaaataactaagtttaaatcaacatttttgtaattacttgtgacaactcaatttttgtattttttggcactgtattctagaaagaatagtaaagaggaggcagatagagaaaatagaatatcacatatttccatgtgataaaattattgtcaaaatattatcaaatttgtttcttaactttactaagggcttcttttctaatagttttcattgcaaaataaacttctctcccacttttttattctgttttactacttgatacaatttcaaaattaaaatatgcatatcatattgtttatctcttcttctatatgtttattgtatacaaaattagagaggaacaagtaggaacaaacacctaccttttaccattaagctatttgcaattgataggagatggggtagaaaaattagtcttcatattttgttttgtattcttgttttgtttatttaactgtgtgtgtgtgtgtattttttatgatttggttttaggttactttgtattttaagacagaaagaacatgaagtacaatgggtagtggaagggactctgagttgagttgcaagaggtgaaaaaatttgcacaaaatgtcttgtgtgcaaaaataattaaatataggacataaatgtgccactttcatgcttacccttttcaatagatttgagacttttctatatctaaaagttttacaaaaagcttattttcatatttgattgcacagggtttccaatgaaggagctagagaaagtacctaaggcgctgaaggggtctgcaactccatagaacaacaatgtgaactaaccagtactcccagagctccctgggactaaaccaccaatcaaagtaaacacatggtgagactcatgtctctagttgcatatgtagcagaggatggcctaatttgccatcagtgggaagagaggcccttggtcttgggaaggttctatgccccagtacaggggaatgccagggccaggaaacaggagtgggtgggttggggagcagcacaagggggaaggggataggggattttcggagaggaaactaggaaaagggataacatttgaaatgtaaataaagaaatatctaatttttcttttaaaaagggagtcattaaagatgcaaaagtacatttaccttgacagtattgtacgcagggtcatactttcttagcaattggacaaggtaaggtagacaggttatctgaacagaaaccatgactgctttttggagacatgtttttaggcaggatattggagaaaaaaatgtccattgattggcttctgtcttttaatatgatgatgtcagcaactgatgttggtatgctaaagctgcaatattttcattacaaagaaaaactaatattccgatctttaatgactgaaggagcagaaactgtcatgagctctcaggaacacccttgtagctcctctcagacagtaaatattgcgagtaagatcagaatgaatgtgatgttgaattgaaattaatcgctggagttatttcttatggtgtcacagtattctacactcaggcttttcacaggaggctttgaagagccctacaggaccaaccaaatgtaattgatacaaaatcgctgctacaccacagctgtgggagcaaggtgctacagctagtactttaatctacctttctttctgagagtttattatgtttttgaatttattcttttgtagaactgggagctatcatttttatggaaattaatctttttagaagatttgtcctctctttttcaaacactaatacattcattcaagggccctattattcacatccagctggcttttatctggtgatatttacttcaaaaagccaagttaaatggtatcatagattaattctcagggcacaggaaagcttttttggagaaaaacatggtttggtaattatgtgaaatatcataataaaaatcacagaaaatgtcagaaatgtgttgtgtcatctgtcataataggaacttcaaaaagctgcttcttgaagtgtggtaccttgctcttgtcaaaacgttttatttcaaaaacattttacatatcgcaaaagtttgatttagattttaatgaactatcacgatttttttgtttttccttacacaaggcaatgaaacttcaaaagaggcttatccagtgctatctcttacataaatcaagctggaaataagacacattttacaattcaatttaagatcccaccgagacaataatgttgcaagctgtgcattttgcaaagtaatatagtaatgtctagtttgcatttttaaaaaaccaaattaatcatactttattgagtacattgcaacaaacctaaaattcatttattattaaaatcttctgccataaatacaaactatattttatacataaaggacaaactcatttattcattaagataatttggataaaacagttggcatatgcattttgtagcaatggaagaaatgacatttgccattctgggagatttgaatttttaaaagggtctacatgtagtgagctgcttgaaatttattctcacatgaaactgtactaagaatgaacacttccatataaaaaatagaagctaacctaaaacatggaggtttaaaaacaagcaaattattacagtgaattatcttttaaatagatatttcataaaagttatgaagaatttttaatctttttctttgtgtaaccaacttataataatgtaatcatgtacaagctttgctaaaaaaacaaagaaaatgaaaaacaaacaaacaaaaaaacaacaacaaaatacctaaatatttacctgggacaaattaaaatacattgtgctgtatatatttttagactgaaacacaatgaaatctgtttacctgtatggttttcaggggtacaattctaatgggctatactacccataggtgtatttaagcctgactaaaattattgtaggattacttaaaaactaacagctacatgagatcatagatggtcattttgagaaatccctttggagatttctagtataaggactgcaggacatggcaccaaattgcaaagtggctcagagcactgtgatatgtatcctacacatattctgcacagtggccactcttttgctgtctgctgatgtgtatgacattctggccaataataattgaagatggcacaggacaacattggcactgtgaattgtgtggaaataataaatgtattgtgttgaaatatatctccaaatttaattttgctctaaaaagattaaagtttaccttgttacatttaatagacttcactattaaatcttgaatcttgaaagagtttcttcaatttgtcatctctgattttgtctgtcagggaagatctaaaaagtataccctgctggatgtatggaactctgtaacctttctaataagacctcttctttgcagatgtagacatgagaaagctcccaaataaaatacattttgttttccgtctatttaaaagcaaagacaaccctactgtatttcagtaaatagtctagatgtctgtagaaccataaaaagaacagagtatctcttgcatcatccaacagaacctagtcatgtcttgggcaggaaagcaattttctgtcagccattttcttaagaagcagacatggtcaagaactcttttttttttttttggtcaatttttttcgtagcatgaaatatgagattcaggttatgtgtctcggtcatatcaatatcaatgtggtgggtgacagaatttgggatggtcattcctgatgatgagcctcctctgcgtcctaccatctgatctatcactttaatcatctctctcttcttcctaagatgatgaccaaactcatcatcctgacaccggaaagctttcgtaatctgacgcttgccacctcgctctgacttctgatgccttcctaatgtgtgcttgcatctcctgtcgctttacttctccggctgtcatccacagccatcatttgtgtatgtctgaaagattgcctagactcggcagctctatgagctgaatatgctctgacatgtaatggacaagacttagattcaatgatctgtccaatatattcttaaggccagtcctttccctatgaatccatgtgatcttcagagttcacgtacatatagtgtacaaaatgtgcatttgtctgtgactaatatctcagttcgtatgtaatgcaatgttgtgtactcaatatatttcattgtttgcacacatgcacatatacacatgtgtgtgtgtgtgtttgtttgtgtgcaagcacacacgcaggtggtatatgctggcttaaatgtgagtatgtgcatatatttatgtgagagtgcacagattggtgtgctcaagtacataaaaagaccaggaaatgatatctggtgtttttctcaattcttttccatcttatatacttagatacaatctcttacttgccatctcagccaagccaagtagccagatcgcttcaaataaagtctgcctcttcctctagaaatctgaaattggtagcagactgataaacctgtccagcatttaagtggctgtttgggatcactgtttcccagacagaaataagcgatggcattggataggctaggaggtaaggaggacccgagaggacataggtggtggaaactgtgttcagagtatattgtatgaacttttaataataaacacaatgtaatggataaatacaaagtaagcaaatcaatcaaccaaccaaccaaccaatcaatcaatcaatcaatcaaaactgagtattaaaacaacaacaaaaatgtatgtgggtgtcagacgttaggtcctcatgctatcacctcctttggcacttcctgactctccacttgggatacagtgcatgccaataatggccacatggatggttttattgtgttttatggagcagttgtattgacagaagattggactgtgtgttgcttagtgaccttcaaatatgtttcttgctcattgtctaacacgatgtttgttcctcatttcccccccaaattttcaaaatttaggaatagctgaacattggaataaagaaaaatgtgaacaaattcaaagacacttaatttctcactaagaattgaaaaatgcatttttgactttatatatatatatatataatggttttttatttatttaatttttttatgtattttcctcatttacatttccaatgctatcccaaaagtcccccataccctcccacccacccacccacccccactttttggccctggtgttcccctttttaattaaatgattcacaacttttttcctttacatattaaaagatatttaacaaaattaaaaatactcagaactggagggttagggcacatctcaatggtacaatatatagcaggaatgcatgaggccctggtaaaatcaacactataataacaagaaaattaagccttcctgtagtcttagtaaggatacttttgtgagtcggtggaagttaaaattgatgaaaaacacccaaaattttacttttatcacagagaaatttaattcaagttaattttgtaattatttattggtgactataacacacacatatgtatttgtgatgatatttaactatattatttaaatatattattattaagtatttaataatatttagctaacatgtaaaatatattctgtaaattttattgtcaaactttccagtgcaacaaaaaaagaacaaaaacaatttcagggcagaatcatttaaccataaggtgttcccaagttggatctgtcttgaaatctccatttttcaatttttttgttgtttttatatagtggttgaaacagtaaaagtggtttgaagtggttttagctaacataaacatttgttggggccagaagttgttaagagtatgtgcctagtgtgcacaagcctctctgcttgagccctatatcacacttatcagatatattgatgtatacacataaacttagcactcgagtggttgcaaaaaactgattcagaagttgaaggacatccttgtttccataaaaagtttgagatgagccgggagcacatgaaaccatgtgtttaaacagtagcctctgataggagggagtaatgagattgggatcctagacccagccaattgtaaaaacaaaataaaactaaccaaaaaaggcacagcattttcctaaaaacacaaaattaatgtagattttagtgatagtagagtgatcactactactagagaggaaaaaatccttttttcctatggaggatttatatgattgaaaattatatagctattgagtttcctagaagaagtcaattgtattttcaattgggagacttaatacattaatattaaacatttaaaatattagttttctttattactattgttagtagaccatgataacttacacaaaagttatttttcttaaattgaagatctttaaatttttttcctaccctttgaatattttggaacggttatttacttcctttttgtgggggggggcggggggcatgattttcctgtgtagtcaattctaactctgaattcataatgtgtccctgggcttttcaaaaatgttggccctactgtctcagcctccccagtattatgttcgatctgtgccaccatgtccagtgtggggttttccttttgaatattaatgtagaacttgttaaagattagaaaatctatgactgagttagccagattttatccttgtggctagtttttcattctttacttatgctaatggaccttagctctgtgtgcagtgttaactctgatagtgtcagtgtgtgaccttaggcacattacagccttccttatatcattcattcctcacattgtagttactataaccagttcattataaaataaaatatgagataaatcttattttaaactgacctacaggtgtaaagatagtcagaaaatttattctcatttaatcatttcacctcctttttcttattcttcttcacatttcagctgaattctgaagaaacacattgaaagcacttattcttgaggtgaaatcgggagccttattcttaagttgagaaatacccatttaaattgcaatctccttaaatgttctcctgttgcccattattaaaattgtattcttcattttgacttgaaattcttttcacctgactgtctaggaaaagatgttgaaagaggtgagagcatgatgtcttcacagtgtttcctgaaagctgtggggtggatgttttggtttcctctagacagcagctttcatcaacccttccctccacatgtaacctacactacactctaatattatttctgtaggcctgaagtgtgctgaggtcttctctgacactcccagcctctctacataaagcctattatcttcagagctaaatactaaatttcaagttgaataagtggcacatttccaggtaaatttggttgtgcatgtttgcacattgacaatggttattctgctgagaatagtcagtatttaagaatactaaattttcaagtgtaatcagcatgttatatattgattcatggtgttcgttacctgacggtccaagaaatactggatattcacatatttatgttggctctcatggggaaacatggattttaacacaactctttttgctatgaatttaacatatagcttttattaaattgtggaaaccaggcctaactatttgcctcagctttgttggtgtctccaataaaaaacaaacacacccaacctaacatacatgaaaactattctgtaaataattcctatttctccctctgagtatctgtttctctctcagatttcagtcttatatttctacctactggatattaatctatatttaaatcatattccaccaatataaattaaactgattttttaattcacatctctcattttacaaagatgactaacagttttttaattgtttgtgttgtgatttcataatattgggaatcaaataacagaacaagttaaacatttcataactttagtattaatatgtttatttcagaattattaatgacttttaaaaaatgtcagatgtggtggcacatggctttagtcccagcagttagaaggcagaggcaggtagatctctgtgagttccaaacaagccaggactacataataaaatttttaaaaaggctatcattggtatagttacattcatagcatagcaaaaagcctttaaattggaaagcctataataaacatcaggtattgtcaaggtcatcaccactgcttccttagggatgataccactacacctttctttgctaatgtacatctcaggacatcatttgcaattttattatctttatctctatttgtacataatcaaatttgtttcacaactatacacacacacacacacacacacacacacacatatataatgaaacacaggctatatatatatgtgtgtgtgtgtgtatgtgtgtgtatatatatgtatatgtatatgtatatgtataaatgtatatatatatatatatgtatatatatatacatatatatatatatatatcctgtgcttcattttttttaactttatatttaaaaatacacttgtttaagataatcttccacgtgtatttaccttctgtgttctatcagcacattaaccacatggaagagttaagattgattatgttcataattttcagggtaagaatggcctactagatggttttatcttctaaaatgataaatatattacaaaaaacacaagtggaccatatcatattgacacaagctccaaattttgaacatatctcatataaatggcaaaccactgagactcctgcgcaagggagtgacagtgttaagatttgtacattaaagtacaaatttcagttccttcaaactgattacaactgttcagatagaaaaagagtagagataaattgcatagatgaaatcaaccagacataaaaaggaattgaacatcaatggtaagtaagaaagcatgagataaggagcagctttctgtttctggctaagacaactaactgataatattattctttgtactctgctctgtaaaagagaaaaatgaaccctagaggcaaacatgtaaaaaaaatttcaatattactcctatgagcatgcaatccattctagaagaggattatgcttttctggataatcattttaagaccaaaatgtagttgttaaaatctcaagctgtgtaaaaagtaatggaaaccaaaactgatttttaacttgtcctgatcaatacttacacaccaacatgaacttgttttgtttttgtcgtacttacacatgaacataaacttgtttttgttcgtcatgacattcattaaaaagtttacacagaatagagttgtcatttttacttgaaatgatggcaaagctatagggaaattataaaactattagagaaaataatttctagttcatttgtttgcttactgaaaattgtccacactacactgagaaaatgaagaagtttctgttagtagttttaaaggttagaagatatatagctacattataatacaatatgtaattttcagcaattgtgggattatagtttagtatcacagcatatttatatgtatgttatcatttctatgttattgtctacaacccaatctagtttagctgtggaaattaataattaatgtatctagtttcaacattatttctgtggaatcatttgactcttgcttacaatcatcttatcaaagatattaacaagagtcatatgtttaataaatacaaaataatttagcaactctttcttttcccatactaaatgctatggaagtgtttaccagttctagcctggatttgttttgctttgttttcagggatctgtttcatctggttaacagtgacagtctggtgctaatgagtcttacagcagcaatagcatcaaaaagcaaagtgttccctgatataattacccctttcttctgcatatacaccatttaaccttttatcttgatagtaatggctataattttttttttattttcagttgcatcaaaactttcttgagttgggtttaataaaagagagcatatgtgaagaacagcattctgcataaagtagttcatttccatatttctcatgagatcaaatttcaagtaatttaagattgaaatcattatttacatttctattatttttcaaagattttcaagataaaacattacattttttagtaattaggatcacaaagatgtttcagtttacctgagaagtagctcagtggtatatcagactaaaaaacagtacaaggcaccaagtttgatcactagcctcacaaaaaagagcaaaaatgattcagcttagagtatgtccttaaataatcatgtttccaagtattacattatactctgtagatatatgttatataattattttaaaggcataaggtaaatattaaaggattgcaaattgctcattgtcgttgtatcaatttgattgtttcaaactaaaactctagatgattttaccatttatgtgttaaatcaaatggactcagttggtaaattagatagatagatagatagatagatagataattgatgaatagatagctagatagatagatagacagacggacagatgagaggagtgagagattgaaacagagaaaagcagaagcagatacagagaagagagggctaggtcatatgttcacataagtactatttctaaatgtacatataatgtacatacaacttatgcctcatttccaatttgattgaaatgaatccactgaaaaatcatgtattcatttttcccatctctgaaataacagctgaatgcctgtggaacctgtgcctagtgtttgcttttacttagaactcatgttttcattgttggatggagctgacatcctcctaagtgctctccaatggaatggcgtgagcacctactcgacattattttcattgtaaacgactcttgacaatgtcaggttcctttcaccgtctatcactgtcactcactaagcagcactgtgatggttagtcccttagagatttgtctcctttatcagggtcagactatgataaatccgaagaactcattacgtgacacctaggtataaagaaggatagtattcaaaaatactcttaccattattaatgaatggtcatataatgaaatatctacagatcacaataatttgcatttaattattttgtgtgtattctatgaaaatttatttaaaaaaatgtagtcaactgttttgagattcattccttattaggtatatgtaataatgaaaggagtgaagtaaatgataaatataaacgagagttacaaatggtaccggttatttaccctcaattttgcatgtttattaaaaaagaaattaggtatattattttctaaaacctttctatttcctctcttgactatggattgtgtttcaaaatctgttgatcatctttctttttaatgagatttaatggctacattataaattctattttaagagcttgttcctacaagtacactgaaaaaaaaaagagtaatgtgaactttcaaaactcaacatgttactttagaaaagaactggaattttaaatcatgaatgaaaatacaaattcaaaggaaaaggattctatagatttaaaaattaaatgtgtgtgtgtgtgtgtgtacatatatatacttgcttgttgtgcgtgagagattgcataaaatgaaaacacttgaaatgatgactttactaattgtaggcatgtctatttctgcagtagccttttttttttttattctcatttgtccacactaatggagacggagcacactataaataatgcaaaaatcacttacagctgacttggttatatattgtgtatttttcattagacttatttcttaattgtttgctctatttattatctaaatgagctaacatcatgagtgtttaatgcatgatgactggtggagatgtctaatagcctactacatagtgagaaatttaatgtaactttagaaagttccttaggtgccgatgttctctatggaatcttctgcacttgagaatactactcagctatttaaaaaaaatgaatttatgaaattcctaggcaaatggatggacctggagggtatcatcctgagtgaggtaacccaatcacaaaggaactcacacaatatgtactcactgataagtggatattagcccagaaacttaggatacccaagatataagatacaacttgccaaaatcatgaaattcaagaagaataaagaccaaagtgtggacacgttaccctttcttagaaatgggaaccaaacacccatggaaagagttacagagacaaaatttggagctgtgacgaaaggatggaccatctagtgattgccatatgcagggatccatcccataatcagcttccaaatgctgacaccattgcatacactagcaagattttatcgaaaggacccagatgtagctgtctcttgtgagactatgccggggcctagcaaacacagaagtggatgctcacagtcagctattggatggatcacaggacccccaatggaggagttagagaaagtacccaaggagctaaagggaactgcaaccctataggtgaaacaacaatatgaactaaccagtactccggagctcttgtctctagctgcatatgtatcaaaagatggcctagtcggccatctttgggaagagaggcccattggacttgcaaacttttatgccccagtacaggagaacgccagggccaaaaagggggagtgggtgggtaggggattgggggtgggtgggtatgggggactttgggatagcattgaaaatgtaaacgaggaaaatacctaaaaaaaaaaaaagttccttaggaaaatacttacgtggcagcagagcagctccactattaagaaactgtggtgccacagaaaggggaaaataagtgttatcttttcaatatctatttaatcaaaatttaagtaactgtctttcctttaaacttattatcttaaaatgtgtttattatgtgttaaatatgtaatgtgtttgcaggtagtttgataaaatgaagcaaagtgaggttatttgaagagttttattctagtagtctcttgacaggatgcatttgagaaattcacatttatacagttatctcacatttgactggaatatgtgtcaaaaagtcaaatgtagaggggtaaggtatataaaattattgaatacgaaaatgaacttttgcattgaagttagggagcaggttgatgaaatatcttttatgtgagtcatttctgtataaagttataaacgtttttaaactaaaagctgtcatagttccttgtaaaataataaagataataaagatattcacttaattgattcttttcattgtttaataaaatcgctttgtttgattgctgaagaattcgaattgagttttcattacccacttctgaacaatttactctgagatccagacagtattgagctaatgagtttgaatttatattgaaccttaactgtcttcacgaagtaaagggaaaaatatcatggcagtaactaagcagtcttcactgaaaactatgtcatagagactttacaacatggcttttagtggagctaaagcattaagtgggaattttaccaacgctgtggtttccatgtttatgagagtattatctattttaaaatgaattcttgaggtaacagaaagttaaatctataatttcatattataatcttctagagaaatgcattgatgttgctaaactgatttgaagacatgatgcatacattctttctatggaatccttataaattatctcaaaacccagattattcggacattttcctgaatattaaagtgtctgtcctccaacagacagttaactgactctggtactggcgttattcaaatatatatatttgtttggaagcaagtgctgtactcattcacacacatctggtattttactttgatattatcatgtctcctacaaagtgatgctttgtgttctatttccaatgactaattaagttatgttcttaaaatcaaaattatttctgttcttgtggttggagtaagccacacagttaactctcaatgttgaacaggttaccatttactgaaaggaataaaatgtgttgtatcactttcgttttactttgaaattatttagttttccagtaaagatgatttactattaggttggttagttcaaaaaagtttagacattacaagtaggttagatggttcaaaaatattactcttctgaaattcaacatcctgtctacaaaatgaaatgagataaagcacaattgagggaaatttgtttgatttcagctcccttccccccaccccccaagcccatttggtaattccccaatgttaaaccttgtcagatctcatttcaaatcagtgtttggatgatttggattaatattctatccaaataatttatattcattccccacaggcagcagtggtggttcttgggataaggaaacactgcactctcccccatcccagggatcccaggctcctgttgcacatgcccgcatgcctgcagcgtttagccttccagttagccatcctctcaaccatctgcagcacagccaccttccgccaaatggtacgatggcaacttttagcactaaaagtgatagttgttgaaaaattattttctttaatgactagcagaataataataattaaaaaaagatatactgcattcacacagtcaagatcatcaaaactatagcatgtctataagttggtacattgccaggaggaataaataaataaagccaagaccaaaatgtttgtattaaacacataaaacttgatatgacgaattatggcaccaaactagttagctgtaggcttaatttcccagtcatgagtgaatattactatatacaaataaacaagctgttgtatctttgactgtcccaattagaatatttttcagttttttgactcttaatgacatgtctttggtgatttttagcctcaacacagcagtgatggtctatctgtattcttttttttttaggactggaacttccttttatgatgatgccccaccctctcattcctgtcagcctacctccagcatctgtcaccatggcaatgagtcagatgaaccaccttagcaccattgcaaatatggcggcggcagcacaagttcagagtcctccatccagggtggagacatctgttattaaggtaactgtctcatcataatgatgttgtggaatggtcatcttcagttaacatccctcactccatttgtttgtatccccataagtaaatttctaaaatctaaagaacaggaaatggtgagaaaaaaaatactaagtaaaaaaaaatagtaagtaggtagatttattataatttcttgatttttagaaataacatagggaaataagttatatacttcaattcgtctgagcacctgaatgcagtgatcattctttgtacttctgtcgatggtgttataagcctttctatatgtttatataactttcaaagctgagggtcctatcactcctcatctggatagatttacatgaataaaatatctagatcacagacttaagtactttaaatttttaattctaagctaggatgttaaagcacagaaaaatatcaagagacttgacttgataccctttctatttgaccacaatttacaaaattgtttgtgttgtaactcctgttaattaaatactacaatctggaaacagctttctaaaactccaaggtgtttaagttgaggtaagttggagaaaaaagttaattttcttctggaagtatctttagctatcaactcataatatgttgttagaaattcagaaattttgttgcggtttcttagactaagtttcagaatgcagaggaaggagatctaaacaggaaggaaatatcttaaaggggaataagaaagtaaatgatatttatgtcttcacacatatgccaacacctacaaagtcatactgatatcccactttgtggtctcttgggacaatttttagaagttttataacagatggagttgaggaagttcatggtataaatcctgatggtaacaaggacatgggaaacattgctctagttgagattaattacagagcagatagttcccactgcaaccgcaaagggaagaccaactgcctaactgcctgatagaagtgcaggaaaacccatcggcccttacggacagaacttgctttgcatttaaaaccctgacatgctaagtgacgcaatcctgttctaaattaataaccacggtgtttgagtttgatatcaggacagtcaatagctcaaatcttgtttagtaaacttactttgtatgctaattaaatgtagtttagggaagttttatttttcccaaagaaaatggctgactacgatgtcacattgaacaaaatgggcccctgtgagtaattagaatagtgcctgtgagttgatttgcttgacaagattctaaatgtaaaggccacttgaaagtggaatgttaaataccaaagacttagtgccatagcagaagacacagcttctgaagacaaaatagaaacatgaaggattgtctacgtgttcatgctttcacagtgatgaaaagaattaagattaagtagaaactaagggagaatggaaataaaaatatatggtttaaaataaaagaaaaaaatgtatgttttggagtaacatattataaaagttttctttcttaattaatttgttaattataaggcccaatactttttttttcaatgacacacttactactgaacacaatatatagtaggatctgatcatctgagtttctgactgagggaaatatctatttgttgttattgataatatggcctttgaatggaaatgctttttaatttatatgttgttaaaaataatagaatactattgtattatagaaggaaagtacataaagttcaaattttaaattctataaataaagattttgggggacaaacattacacatatataaatataattatatatatatatatatatatatatatatatatatacatgtatatatatccaaaaggtgtatatgtatgtatatatatataaaggattttcatatttcataatatattaatttgtataaagtctatgactactttcacatacaaagacaatgttgagtaaaactgattatcaatgaataagaatggtgtctttcaatttcaattggtagactgtacgcttaacaccacaagagtttttagcccagaacaacatacactcaataaacccacacatgcacgtacacacacaaacacgaacacacacatgcaagtacacaatatttacacacaggtgcacattcacacagtgctatctgagaacagaaaacaaatagttggtctctgcattacatgactgatactttaaattcttatgaatcttccattcttgtggacaactgtagaagctcaaaagaaactcaaaccatatagagaagatagaagagaacacaatcatcaagatttcagaaatcaaaaaattaaatgccaagggaaataactacatgaagactataatagcactctctttataagaggaattttcagtgagactcagtgagaaaatttgccagactgttgctagtttggagaactggaggagtttagtaagttaaatttcaggaagaaatgggcaaatactgtttagaccattgtaattttaccttaaatccttaagaccaatatatttataaagataaattattgtaaattgtatatgaatctattatgcaaatgaggtcaatgtagttttgctgtctatcagtcacagaacttaaattgacaataaaatgggattttatgttgttttggttatatttcccattgttgcaacaaaaacctgactgcactggttaagtaaaaaaggaaatgtttattttggctcacagtttgcagatgcaatcctctgtatggagacgtcagagcagtaatgttgaaaggagctcgtcagattgtcttcacaaaaaacatagataagggctactatgagctggtttctttattctgaccagaatccaatcaggcaatggtgctacttctatttaggatgggttttccacttcaattaaccacatataaacactccctcatacattttcagggattggttaccatggtgattctacattccttcaagtttataaccaaggttagccaatccatatagcatgcagtctaatttcccctgtggttgagaaacatttcccacggcttcaccccatacatgcatacatttcaaatggttcttaatctcgcaaaataaacactgaggagtatattattcaaattcatcaactaagcaggttggatctcaacaactatttatttagaaataattttttagaagagtgatgtccacagattcattttggttcagtctcaaagatttaaagctagcatagtatctttagctccagaccctgtgttctaacatcttatggttttacttaatcaaacattttggctgacattttgcatctttagtggtgacctctgcctatatactgtgatctagaagtaatctgattaaaggaaagactctggactttgatataaaccacaatttgtacaatagtctacaaatgtagctctacgtcctaagagtttttgttattagtttgtgtttttgttggggtagggatttgaatatatttctcagaatgtttgctatataccccactcagtcaatccttaaaaatctgtctttatattagaaatttgtgtttatctacttttttaaaaattcaatttcgagttccttgatttagaatctataagtaggttaaaggataaagcccaaaactatctgtaagtttctgttctctatgatttctaaattttagaatgtttttctttattatcttaaatcactgagtaaattaagaagtctaaattaagagttcaattccttttgtcattagcgagattgataatgggttgaaatgctttgctaattgattctctttggattctttgaacccataactctaagccttctgaatgaatcactgttctaatcacattatatttcatacatgcataatgctatcatgagatgttaagaaaaagctcctgctgaaatagacttgatggctttcacgtggagcctggagtagggtttctgcccttcgtgtgttttctgttctaactccggggtatgtgccagattattttgtacctgtatagctagcttcctcttctgcatgtagagatcatagtggcacaactttaacacagaattacaataaagaatttaccatttaaagtatttgcaattatttcagcattgcccattgcttatgagtagttttattttctttaaacttatcattagtcatctgatcccaggcaatcaggttaaccagatatagtcatgaatctgttaagagagtcctttgtcccttactgtctttttttttttcaattattttcacctaaaatataaaatttggcttctttagaatccagttcagatttaagcagaagtaaatagaaaaagaactagtgtttttctttatttgtagtatgaatatcatacgagaattaacaaatgactgattaaatctcatcagcatataattattctacccaataagtgaataagtaataaaatcatcattttatatatcacccgaagggctgaacgttgagtgtcattatcagtactggcccgaatcatagaaggcagatattatactctgcctttgaaggcacataacactattcatgaagttcacttgtggccaaacaaacttgaatggacacttcagctctaaatctgctagactcaagaaagaaaagatcataaatatcatttagacacatcaatgtaactgcaaataaaagattatagttggagtggtataataggaacatatactgggcctaatcagatgggaacttggctctatacatttgccatgcaaaaatgccagcaaacagcaacagaaataactctgagttgactgacctgtttcttctgtgcttcattcttttatatttatctttatctttttgagtagaatgtaaagagttctgcctcttaattataatgctagtactaatctgataggattgtaagttcaattaaagcctgggttatatagaaggaaccttcctgaaatgaacaacaacaacaacaacaacaataagacaaacaaacatgaatttcattttttactaagatgaattataactctcaagtctagattgtgctttcatgctttgaataagtttatgttatgtatatctattaaatttacgtaaactctgtcctataaaccaataaagtattaccatctaaatgtggaagaaatggaaaaattctttagaataaagttgaagaagaaaagagaaatacaattaaaattataatccttgctcctgcttgtttaaaattgagtaaaagtgataaaattaatagggttttcaaataacaactcattggttttaactgatgtaagtatgtagacatcactcattgtgtctcttagaagtcatttcagcaaatttccaaaatcaaaatatgaaagctacaatttgtattctttttttttctttttgagacagggtttctctgtgtagccctggctgtcctagaattcactctgtagaccaggctggcctcgaactcagagatcctccttcttctgcctcccaagtgctgggattaaaggtgtaggccaccacacccagcctacaatttttattcttaacacagctttcagagcatgggaatttgaatttatcagtgaaaatgatgatgtaccttgctaagtctacagtgaatgagataaggtccatgatgaaaaaaaaagtcattaaaaaccgtaataataatcataactttatatcctgcatgacaggaggtaatattcagtaaatattccctgaatgaaacaatgaaagtgtgagcaaaatcaggagtgtggaatatggattatgtactaaggaaaagcagtggtcaactctgtcaatgtgcaattcagaagttgtagaaagataagtcatttaaagttagaaagagtggcttatctacttctatgtcatttccagtgagaaaaattctaagtaaaataaagatgaagagttttataggggtttgaaggaaattaaaaagaaatcatgattaattaaagctaagtgaaataatcttctttataaataagtagttgtgattattgatgctttatcatggaatgtaacgctggttcctggtgaagagcaggtagcaaggacagtgcagttttgcaaatattcagtcatggatgtgacaatatgagtgtggtcgttttgaattccacctttacctttgtattagcataaagaacaatacttattgttctgcatcaatgtatgcagccttctctctgcatttatttttaaaccattactttattagtctgaccttctttacagtgaaagagtactcctcttaaattttcatttattatcatggtgagttttataaagatggaacattgcgaaagattgtgttttattgattggtggagttggtgtaggactataaagcagtgtgtcaaagcattaaataatattcttttctgttctacctcgggccagtttagaggttaaaaggtatcaagcaaatgaaattataaatccagtttacatagtttccccaaagatattgaacttctttcctattatgtataaataaaactcattatctattttgtttcagtaataattacaaggtcctcctctaagctattctttactgtctccattattctctatcctatagaatactctgaaaaggcaagcatataaatatgataaaagaattaagctgttgaaataaattaatttattgtggaacaatgtattcaaatcttacttgctcgatggattttgctttaatgaaattcttcaaagaacaatacatcacgttctaaagattgaaattatacattaagtgaaatgactgaatatgttgtgtctcaatttataggaagtttcgattgaataattaagcttttaaatcataaaatttgcataaaggattttcttaaaataaaagtattatgtattgccacagtattctctgttcttaaatataaactacaataatgtcaaatgagaaaacccattaagtgcttcaacttgtataattcccttagctttaaacaatgttataaaaatgtattttctattgaggctttaatcaatttttacttagttattgtgtcattttaaaggtattttgaatgaataaaggcatgtgtatatgatttatgagttaaataaatcagcatagaaaattggaacacttacatatattgaatagtcttctactcatgaaaaacgtgtaaagaaacaaacaatatgttttattggcatatccattgctatttaagtttataaataaataatttttttttgtgaattaaatatccaagcacaatgtttacccatgcttttcattagtacttgttatgaaatttgttatggcagcaaagtcagattgcaaatgatttttacacagtttgattaacttttagattgtcctttatctctattcagccaaacatgagcatgtgccattacaaataaagccactaacacaaaagttttaagataaattaaaaagtattggaaacatggatgtcatgctttgtaggagatatatcggttaacttagaaatttctatttcaataaaacacaatatttctccagtacatattatatatttctatataagtaaataaatatcaaccttattgaattgaaattatgtctaaagcttagccaagttatcctagtctggtaacttctcttggatcttgagaggccctttcagtctaaataaggagctcgttttactgacgatcagagttgatggagaatatacagttttttttttcagagatttggtcgctgagaggatctctatgttttatccattgtccctacctgcacccagtcacaaattggtagcactaagtcaactcaattggtttaaacatataaacacataaagttggtaggaaaattttagaggaacagagaaaaattggagtggaagaaaacgaatgtaggttttgtcaagacatcatacgcatgcttgattatcaaacaacattttttctaattttaagaaaaaaattaaaaagaagaaatcaatatcaagatgcatgaattctgaaaacctggcttgattatggatgcaactctactatactacatttaatacataaatgtgtccttgcattctttcatatttttattgtaaaacttcatactcacctcttataataaatatacaaatacttcaaaagccatctaaaataaagacattggatactataataatttaactctatttgtagttgataaactttgatatgagcctttttaacatcataattgtatgaccatttcttctgtccttgtcctccctagaaccttccaaacacccttatttgctctctttcaaattcataaactggtttttcattgactcttattatgtatgtataacagtatgacagtatgatagtatgacttatgtatgtatgtatgtatgtatgtatgtatgcatgtgaatgtgtgtgtgtgcatatatatttctaaatataacctaattagtcttaatactgtaattcttgtattttcagtgctaaccatctatctggtattggataaataattgttctgttcttctacggaaagataacttttcctactcagccttcctcagttgcgtgaattctttgtgaaatattgaagtcttgcaggcttttcatttctgctttggcatgtaatttttgttgttttgtctagttatgtttagaaaatcatgttagtgagannnnnnnnnnnnnnnnnnnnnnnnnnnnnnnnnnnnnnnnnnnnnnnnnnnnnnnnnnnnnnnnnnnnnnnnnnnnnnnnnnnnaaaccctcccccacccattcccactttttggccctggcattccccctgtatgggggcatataaagtttgcctgtccaaatggacctctctttccagtgatggccgactaggccatcttttgatacatatgcagctagagtcaagagctccggggtactggctagttcataatgttgttggacatacagggttgcagatctctttagctccttggatactttctctagctcctccattaggggccctgtgatccatccaatagctgactgtgagcatccacttatgtgtttgctaggccccggtgtagtctcacaagagacagctatatctgggtcctttcagcgaatgcttgctagtgtatgcaatggtgtcggatacagaatctcaaaccacattctctgatggaggggctcatatactctttctgctccctcttccacagtgttatttgagacttaaggaaaacaacctgtaactcatgtaagtctatgtatatagattccatggctacccatctcaaattctaactcttggcatgaaaatccacatctttctgacttggtcagggttgtccaaaggctcctaaaatgtatagactattgctattgcccttggttgtccccagatttgtaaggttaaaaaaccctattgataaaggcaccatgaactttagacataaactttggagtcctatgaactgaaattaagttgagtataccatccttaagaactaatttatgagctccctgagacctaaccgccaatcaaaaacaataacaaaacaaaacaaaacaaaaacacatggtgggatgcatggttctagctgcatatgtagcagaggatggcctagctggtcatcaatgggaggagagacccttggtcttgagaagactctatgccccagtacaggggaatgtcagggtcaggaagtgggagtgtgtgggttgatgagcagggagaggggatagggggttttcagaggggaaagtaggaaaggggataacatttgaaatataaataaagaaagtatctaataaaaataataaaaaaaatattgaacataattagtcatcagagaaataagtgtattctatttactaaaaagaaagaaagaaaatttttaaaaaggtgccatgtgagctgcaagtttccacaaaagggaagaaactaagtcttccctagctatggtgtctgttgaatttcaggcctatgggacgtgtgtgtgtgtgtgtgtgtgtgtgtgtgtgtgtgtgtgtgtgtgtgtgtgtgtgttcatgtgtgtgttttcttcctattttcttcaagcatttttttcagtgacttgttcttcagccttttaggtgaaacagcagtgaagctgagttggaacatatgtatcttgtatttatctaactattacttagttttcatataagcaaaaattagaggacacaatattcaacatcttttcaactatggtgaagggtaatgctatgttataatagtccagatagctctgttttaaatgacttttattgtccttttcggaaaccaacccacatctagacttgctaaagctgctacagttcagcagcttatcactacaagaatttattgcatttcaactagactagaatatagatgataattttgttttgcttgctgttgttgttttttagtcttttttaaaaaaaatgtttgagcagataagttctttgttacttgccgtgcatctatttacgggattgcatcatgctctttaggacatgcatcagggattagtttatgatataaacttttaaaataaagcttgagtagggtgacacttgcttcattttaattgtggggctcttcaaagtgaatcctcggggtatctgttaaaaatgttcattggcaacgtagatcattgggagaagtgtgcatgatgcaaaaaattacttgatttggcctgcttgatttctatctatctatctatctatctatctatctatctatctatctatctatctatctatctatctatctatctgtctgtctgtctgtctgtctgtctgtctgtctgtctgtctgtctgtctgtctgtctgcctatctatctatctatctatctatctatctatctatctatctatctacctacctatctatagaaagaaatttctggctctttcttcatggataggctattttgctttgggccacagaaactaacaatgatacaccagttgtcttaaaatattaaaaaatattctgacatttctagattttaccagctcaaaataaaattattcaagggacggtgttcctctgatactctaagcagaatccttagtgcatctccagagttttggcagtagctgaaaatttctggcatgctgatatgtgattccagtcttgcctccttcttcacaaattgcctatgctttatctacacactatcttgtaaggacactaacctcagaagatcagtggtttatccagtgcaatattcccccttgttgacaagttactactgcacagataatcttccttataacctcatattcctaggaacaaagagttcacatttccacatgtatttccataggtcttgctttcaggtgctttactcgatctggaaacaaaactcaagaactaaactctttcctgatgatttttttatatgaggtagattgtagccatctagagaccaatggggtttttaaggacagggttgtgaacagtgctttttctttgcaactaaaattaaggttggttgtgaactatgtcagtgctggtaaccaaacctaggtcctttgtaagagccctacatgtccttaaccatgaagccatctcttgtctcttgtgtaccattttttaagtgtcgaaggttgtttctaatctcaaatatatattggttattatagagcccattcatgcctgtttgttaatatatgaaaatgaaaatatttggttcttaaagtatgaatttttaaataatagttaatttattaatctataattccatttataatatatattaacataactctaagtagcacagcgacaaagcttattcattgtgaagtgcatagagtagtagatatgtcttcatagaatttagagagagacattatagcaagattgtctgaaaatcagttgatacatatttcacaaatagaaatggggaaaagagcctatcttcagagattcgttaatacaatgaaaataattttaatattaaataatactatgttgtcacaaagcattaattgtgtccattaaatgtacagtggtgtcacacagtgttgacaatcttctgataatattctggtatgttatatccataaggtttatagtcattgatccctaatacctgccaaagtagaaaacaaaatgtaaaaatgcactcaaaataattatccagaactcagggttgattggttctatcaaatttttcttgttaggtggtcttactgggctattttgaattgtcttctatggcctaatattttctccaaagtatgctttagtactatttgccgtggctctattgtggtttaccagtaaaataataattttctatcttgacttttcaagagtgtatgatatcagtaattcagatgaaaatggatgcaagaatttgagatttgtggtcaagattaaatatatcttttagtgttgataagtgcaggtgaaacaccatgggtattttggaggacagagcccttttcacatttctaattgcattagagaaaaataacgttcatgaatcaagatcaacgtattgaccccttcttctcccttttcactctgtgcaatttaggagcgtgttcccgacagtccctcgcctgctccatctctggaggagggccggaggcccggcagccacccatcctcacaccgcagcagcagtgtgtccagctccccggcgcggactgagagttcttccgacagaatccgtaggttttatatttctgcttgtcaccatctgaaactttattaggtgcagctgggccttctaatcaaagttccctcattccaaatggatctcaaatgtatcatgcaccgaagctccctagccatagccatccctcagaattatgtgtcccagtgtggaatgctatgaaggatgacgcgacattaacaggttctgatataacatcccttctttgatactacacagaaatatttgagctatgaaacaagaaaaagtaagtaattttccagatgagtttctgaagtacacaaccaattcccagctatctgacacctaagtaaatggtttctggtttattcaagtgcatttcttcaatgaaaactgctatttttacagttcatcagattttaacaccccccccttttttttaataaaaaatactcccaagtacatatagaacaaatcaaattaagcacagtaaatctggaaaatccaatactttgccatttagatgttcactgaattaaacgattttaattttaggattatggtcaggaataaaaagtagtatataattttctaatagtacctacatcagatggctcccagagatctgtcatgctagctccagaagaaccaaagttttctttttctttttctttttattattagatattttcttcatttacatttcaaatactatccccaaagccccctataccctctccctgccctgctccccaacccacccactcccacttcctggccctggtgttctcatgtactgggctatctaatcttcgcaagaacaagggcctctcccccattgatgaccgactaggccatcttctgctacatatgcaactagagacaaagctctgggaggtactggttagttcatattgttgtacctcctatagggttgcagacccctttaacttcttgggtactttttctagctccttcattaggggccctgtgtaccacccaataaatgactgtgagcatcctcttctgtatttgccaggcactggcatagcctcacaagagagaactatgtcagggttctgtcagcaaaatcattctggcatatgcaatagaggagatttcaccaataaaatcatagaaaaattatcatgttagtattattatagtattattttatatggtatagatattttgcacttaatgacttatttaaataacattttaaaaagcaaaattattttcaatcatgcaatatactatgggatataatagtatagggatactgaaacgtgatatcagtttattagttacagaaaactgtactgattttatcaggtagttagaaaatcactcctattaaactgacactgttaaagggctttgttgagaacacaagtttcccatatgggggaagttcatttgctaaagagaaaacctgatgccctagaataaatattgaatattttattggtattggttacactaacatcgacaggccacaaattctaaccatggaaacgggtttaatttatgtgacattaaatatagtaaagtggtattatttttggtctttattgctcatccttatccatctcccagtaattttactaaaggattgtgatattaaatttgggtattatgtgtttatggttttttttttttgttgttgttctaaaaacagttcaatggatagatgttagccacattttctgatgttgttatatttgttctttgtttcggggttgacagctgtccatcagaatggcctgtccatgaaccagatgcttatgggtttatccccaaatgtgcttcctgggccaaaggagggggatttggctggtcatgacatggggcatgagtcaaaacggatccacattgaaaaaggtaatttatgattctgtgccctttcttttgttctggaaatgaagtatggcatctatttctgtactagtaaaataagataaatattttaaatgcacactgttaataaaatattaggcctgctcaacaaaaggtgtctgaatacagatctgctactttcctgttgcacagtggtaagtgacaatttaattttcacaacatacttacgagtgaactatatgtttcactcctattttttatttattaatgtattatttgtgtttcatgatgtatccaaagccattatattttacttagcatgacagaacataaaacagatcacagaaattctattttgatttaaagatatatgatctttaagtatttcaggatattcaagtgaatctttgtagtcatttcaaagggtgtaggaaacagggtggatagctcagtcctacaaggacttgttttgaaaatattagtttctgagttccatcaccagaaaataacccaaaaaagtctaaggacgtgatgattgtgtgcttgtgtctaaaaactgagcagaaggagacttgagttttactagtgatttctgacaagccagcctcttcttttagtgtgttctagttcccagtgatattcagtctcaaaatgaaggctgttggttactgagaaagacaaaacaaagcaagcaagcaaacaaacaaacaaaaaacacctatgctcaacttctggcctccccacatttgtgccatgtgcatatgaccccacatacataaatatgtacctgcttacatatgaacacacacacatacaaagaagcatcaacccatatatccacacatacacacaaacacaaacatcccagcagtaacaaagcctagggtctgcaaagatacagatttcctactaaagtatttctatatagatctaatccaattttaaaaccaaagtgctaggaatgtacttgtgaattttctaatctgggaagaaatttcattagaaaattgaaatgttattttgctatgcatattaaatatgtattctaaaactgtaagtgcatattctcatatgtgagtacatataacaagtattgtgttgtacctatagaagcctgctcacttgctgtcaactttcattctttgttaacttttttttaatttctgagattttgatattatgatgtctttttactttccctttccccctccacactctcccacacccctctgaactttttcaaattcatggtggccagtgtttttttttaatatatattatataaattgttcaaattttacacatgtaaattacttgattggctatttttgatataaatcaaacaactttgttttgcccaagaataacacacagtacttctatagcatgaacatgatatgaggtttagtcctatccatcataggagaaatgaaataattcaattgtcaagtttacaaagggtgttgaaagttagattttaagtagttcaaaatgcttttaaaaaattgagaaagcctggagaacaataaaaatgcttagagaatattttcctaaaatagattacatccttacttactcccttaggaataaagaatgtaattatttaaaaaaaaaactacaaactcttcaaatatttacaaataaggctctctgttctttggaacttccatgagaatatcaccctgttaaagtggaaatacatttgagaaacagccacctgagcaaacttttctatgatttactgtgtatgatcactgtgtgtatacacactggctattatactattacaactttagtggagtatatatggcacatcaccaagtcccaggccctctagatttctaattccaattttccatgcattcttcattcatataccatgaagaacattcatggtatatgttctgtatcattcatatttaataaaagtttatcataactcaattatgaacgttgtcatattagggaaacaatttgtaaaattaagttcttcagtaatatttaatataaaattaattggataataaagaagtaaattttttgcaaagattcagcaactgagtaaatctcttaagaaaataagtgactattttctcaattttccaagaatactgtttagctagttcaatgtaaaaactatgaggagcctgtagatatgcctcagccagtgggcactattttaaacacagtggctctgatttgaccactgaaactcgtattatggaaggagaatcccagtcttggaaatttgttctctgatttgcaaatattctcactgacatgacacacagagacacataataaataaaatatgtttaaagagaaacagatatgggaaattaactggtaatatacaatggatatcaatataatgagttaaattattttcaataatattggtatgaaacgctgggaattaaactatgaaatctagagagagtgataaagggacattgcttgactgctcttccagatgtcctgagttcaattcccagcaatcacatggtggctcacaaccatctataatgggatccgatgccctcttctggtgtttctaagaacagtaacagtgcactcacatacataaaataaatctttttaaaaaaagagtttttctagactactgattagttgttgtaattattgtattaatattatagaatatttttaaatgttctattcttttgtatattcctaagtccacaaatttactataacatttgtcttctcctgtggaaattatttattattgcactttttctttgtgaataagctctgagtcatctgaacatatacagtaattgtaaataaaccaagttgtctatgtaattatactatgtggtttgaattggtagagaataacaagaaatagaaaagaagagtgaagccaaaaatggttattgcattctttaaatagtaaagtaaaagtcaaaaatgtctttctttggtagtgtgattatcttagagtgttctaactatgaatacatatggcaccttactgttttgctaaagttactattgtactggggttttctaaatcttttctctctcagaacacagatcttaaccaaatcccaagtgtatctcaatattttatctacaaaattaactgtttagcattctgactgggtatatgaaactaccattgatttcaaatcatggaaattttaatagatgttgttataattatagtgtcttgttttatgttgctctttctcttagatgaattctatctctttcatctacttccagcatactgaattaattgtaaatattcatgggctttctagattgatagagtctgctaaattaaaaattgtttttttcatgactccatttatcatatccctcacaatagccctgtaactttcttactactcatatctctactgaacaagtaactttatttagagaaatctgtagaaaaattaattatatattcatgtcattttcaggttgaactttttatgtgcaatttgctttctaacaactaaatcattcaaagggcaataattcctaggaaaacattgatgctttgcatagatagaaaaattcattttgtgccccaaatgatttggtgtgaagtcttaatcatcaataactttgaacatgtgtgtcttccttaataagaaaaacccattgcctataatacatgctaccaaaaaaaagtcaaaaaaaaaaaaaaacaattcatgatcagtttacggttagaagccatataaactcagagttcaggaaacaaatagctgagtaagtgctctcatttattattatttatttgcataaagaagactccaatggaaatttaagccttgagaaggtttaattaaaccacatttaaaatattaaaaatgaaaaattgttttatattgagaagtatagacatttaaacttcatgtggaaatcacaggcaaaatgagaaatgtttatgaagattataagtttttattaaagtcaagagtttgtaaaagaaactccgatgcttcaaaaggaaaggctaaaaaacagttacagtgttcttctaaaaattatttctgtaattattaagatcataatataattatattatttacccatctcctttcttcctccaaacccttccatattctctcccttgtcttctgtcactctctttcaagttcatggcctcttaatattagctgtagttacagtcatattatatatccaaaatatataaatagaatctacatcttctaacatttaatactatcacaagttctctggagctttatgggtttagaaaaaccagggctctttcccatctgagtagaaattgatcaacagatattaaataggacaggtttacatgattctcactgctttcatgacttgggtcttaggatcttgactagaatttatgtggggttaaatacatgacaaatacacagacagaaaactggggtaggttggtctgggttctcagatgaagatgctgcgtcatcgcagaagctcagcatatattttatagagataagaagagagaggcaggcggcattatggtatatgctaagtaagaaggcaagaccattgcagataaatagaaattgggttagtatatactgctggataagggtgcaaattcagctactactcttaggagcagactttgtgtggaatcagacttcaggatgtgagcatctgtggggataaagctatgtgggaatgttttctatacagactattgatatccacacagtgactgatagaggcatttgccatccctcaaagccattctagggaaagactttccagctttgatagaatggaggctttggggtccttgacagggctgtgcatacccaatagcacacattcagttgggacttcacaagttctctatattagtaaatttagttcttagatcattctactatgatgtgactatgaataaatatgcattaaggcacaaatgtataaaataaaccaagacagtacatttctgcttgtcctcttctcttctctgttccctatttcctgtcccttcttgtctacctctcttcttctcacttcttccctttcttcttgtccctccttaattaaaatatttctttcacttgtttttttaatttcctttctcaaatctgcttttatcaacacaatgtggaatacttttggttctgagaaatagaatactttccctcacttgtgtcttctgcagggaaccaacattttaggagcaggaaaaatttgaggaaggttgttaaggagacttgtatcaggccattgaacattttctttgtgggaaactttgtctatcactgttcaagatgcccagaaatttttgtcctcgtataaaaggaatttgtttggcactgtgaattagaggacaaggtgtgaaatgtaccaacacagattaaaacatgtccatacctaaattttctttctcaagtaatttattctgtactgtagttcttacatatatttttttccaaagctggctaaacatgacttatctcaagtttcttaaaatatgttttaattcctttgcatatttttcattgttttaaacaatgtgattttaaaacatactattactttaagatttttatcttcaaaaatgactttcttctttaaaatgatagattgccattacactaattaatagtaataatacattctaacctattagaattttattatctcatgtagttatcacatggatttgtctagattaaaagtcctttctctgtagaatctccaatgttttcacacttttaacacatattacagtttgaattgtacattcactatgtgaggtccagcatcaaattcaagccataagatctggctgcagctgtctttacccactgaaacattctactggccatagagattattatttcatctgaggcactcttatgactcttgtcatactgcacattaatttgctgaaattatttttgttgttacaaacatggtgtacattattcctttgattagactttttaataacttctcatttctaagtacttagatcaagcatccttcagttacaaatggcatctttttaccttcttaaagtatgtttgtttttattattatattcatataatgcatttgtgtaaaatactcattccctactgcctcttcaccccaaattcatgtattttctttttaattttacatatccaaaagttcattcagtgctacatctatatgcagtgtttagggccattaactggagtatgggtaggctttagagacccacattcctaaggttaggatttttttagttcttttcgatccatgcttggattttgactatcttcattttctgtctatcttgacaatgcatttgaagtcacagtaagtctacttgtgtaactgtatggtcatgtccactacctctgactcttacaacacttactttccctcttcattgatgattcctgagtcttggtggaagaggttgtgatataaatgtcccgtttaggatggaggactctataatctctaattttcagcacattgactggttgtgagtctctgtattaatcaccatctactgcattaaaagagtctctctgttgacggttgagtgatgcactaatctatgggattagagataagtgtgtagagggcattttattactgtgtcgattcagcagaataatactactgaattccttacaatggcatatgacatacctagacaattatttcagaagcagttaattggaccagccatgagttcctttttgtgtaacaggtcttatattcaactgaaaaaaaagtagttcattggtcctataatgtacatggcattactacacaattatgtgaacatattcactatacctaggaaatagaaacaaattagatgcccataaatgaatagaccataaagatttagttgatatacataatagaatattaatcagctattatgaacttctcaaaaaaacataataataatccaggatgagatgatccatagccagaaggataatgatacaagtcactattgtatgtgaatattagctttaatgttaagatacatgtgttgaaattggagtagccctagaagactggaaactagtaaggggaatgtgggtaagatttcaagaaaagggggatggaaggcaggaagtatgaagggcaaaatgggaataataggacaggaagggtaaagtggatggagatggaagggtgggctcgagggagactatgaggaaagataacaaatactttaccttagccaaacaagaggtttgggccattaaagagtaccaggaatgggtttcatctcacagagggtgctttatatccaatcaaagttggttggaaggaacttgagaccatgcagcttcacagagactgacctgccaatcagggagcttgcgcaggactgactgaccctttcacatatgatacagctgtgtagcttgatcttcttgacagactcttaacaatgtaaacaggagctgtctctgagtctcttgcctgcctttagggtgctattcctctattgcattgccttgtctagctttaatggaagagcatatacatgtgcttcaaataccatatgtttgaatatattgaaagttaaaggagaacatcttttttggataggattgctatctttgaaactgtcacagatagtgtttttgtagtgaagcatttttgcgtattccagggatttattttcatatatttgatgtactatttctaaaactatttattattattactagtattattatttgcctcagatgaggcagagggtgggagcaattactgattcattaacatgctagttccaaatgtaattcagctttgtttgtgatttatcaatcattcttctacctcattaaaattttttgaacagcatattgtttagcttaatgaattaattacttactatattttattcaacaaattgtcaaaatgttgcttaaatgtggatttcttctacctgtgttgtttctggctgaaactttgagtgatcttttgtgaacatgatctacagaagctgtgtaccttttataatatatcaatttgagaatcacttcacactgccatttcattttggaaacactgaattaacttaattaaccttgtttagtagagctctaactttttattttgtacattttaatttagcaaatgggcagataggctttctctcaactaagtccaaaacattttctgttattctctgattaaattcattagagacatgcaaaaatggtcattatcagttctgcaattccaaaagctgtcctagttgttgttaacctaatatagtaacacagcacaagtgctgagttttgaaagagagcaagtgacactgtgctattggaacttttatagaataatgatagaaacatatcaagccatatattcgaacatgatatctcaacatttaacaagatagaaattacaaaattgatatatgaatatttgatttaatattgacttctctaaagacaaattaaagatgatagcacatgggtgatttccattaaatgtagttaaatgtgtttcttccaattatttaaagacacactctcactctgtagctcaggatagcatgaaatgtaatacgtagctcaggctgacttctaacctgagatgattagtctttccgagtctccagtgtactagtgttacagaatgtgccaccacagcacattcacacatattcccttaacaactgtattttctgtcagtttaaaatctcttgaacatgttttttaaatgaaaagatctgtcatgtgaaagcatcgtttcactcttgcctcatatgcagagtcatcttgcattgaaatttcttgtcacacatgcacatccatgacctggaccagcacatagagccacagcttggcattcactaggtagttgatggagtgatctctcggcaagagctgtattcagggttaagaagcagagtaatggccctgttgtcttctgttctgggagcagttttcatttctccatcagactgatggaatgatttagcacattcatctagccttgtttgcaagatgtgtacactgataggaaaacttacacaaatttcaaagatattgcaactaatgcatgtgacaccttaaatcaaaagttaataagaagtagtggctcttgtgtctaaatgcataataatgtgatcataattttaacagcttaaaagagataattgctcacctattctggagaattaggcccagtattttcttttgactttttgttgaatattaccaatcaatctttcctcttgacaatctgattgtagagatttatgtgataacttctgtatgtcataattagttttgttccagcagaagccatattttaaattttgtttaaaattgtacgttactgacattgctagcatcttacgctacagtttcagaatattaaacaagtacaattgttttaactactgtgaaattgacagatgaagctgaaaaccaaaagcacctttcatgggattttaaacactattttcctccatatgccatcccaattattatttagatattacattcctaatttactgttaaggttgattagaattcaagcctctcaaaagcatgcaccaaaggtcttgggctgtggaaaacatttttataaaataatccattaatgcagaggagtgcaactaaattagttagcaatttgctgagcatgaattaatgaacagagcttcttccagctcccagagttgtaattttcataataacctcagacctttatttggcaggttgtttagttttttcgtttgaaggttttcattagtctaatgaggactgtgcaagggcgagcagtcagcacaatttacatggggaagctatcataataaatgaagcaatttgaataacacgcaagggtttatgcaacaagataagaagagattgtagagcgagatttagaggtaaccaatacattagaccaactaataactgaagtaatcccaataaaaggcttaagtgaaaggactgaaattaatgatatatacaaagttgtaatgatatgatacatgattcattagattaataaaataagtgttcaattgtttttagtgggcttttttgcctaagctttgtttgtatcaggcattttaattaggattgttcactagaacactttgtttagttaacttttaaaccatagtaaaagatttaatgatatttcctccgtcttatttaatctttatagccttgatacaaagtaaattgaattaattatattcagtatattgtatatggagatgctttgtaaagtaattacatgtagctctacctgacaggtggttaaactttagggacaaatgttcaatgtgctattgagttcttagaaacaaatgatttttgctttttgtttaagtaatgtaacacgaattataatgccctctaatctcatctcaaaatggcaatgcctaagattctttcaatattgaattttcctatcaatatgtaaactttagaagggttatctcatggttgacatgtgttgccaagttacttttgaactaagcagtccatcatttcaacaccaactcccctaacacttttctaggagaggttacaacctcgagggaattttctctgctaatcacaagagtgcgctatgtgtgtaaaactagtggacattatgacgtcactgtgatgtcttctttctaagtttggtagtgctgggctgcttcttggccctcatttaaataggtttctctgtatttgttcatgtactcagcattttgctatttctacctatgtaaagattccttgataaaaggctgacaattaattttaaatgaaatatcatactttaagcacatgaatgtgagacttttgaatgaagtttctgataccgagggaaaatatacatgtgcatatatagatatacatatatctatatgtacatttatagatgtacatatatatatatatagatgatagataggtaggtaggtagatagatagatagatagatagatagatagacagacagacagatagatacagatataaacattttaagagtaaagtgcactctttttacctcaaatatattatttatttaaatataactgtgtgcctcatgacttcattggctatttgcatattgatccatctttttaaattacaatttattacatcatccccttcctttccttcctccaatcaatcctgaagatccctcctttctagctttcaaattcatagcctcttcttttgttacagtttgttacatgcatctatatgcatatgtatgtacatttgtttatatcctgctctgtcagtggaatgttacttgtatgttgtagaggaattttaatccagcgacatggctgctctgtcaagggatcacatccatagacatagctctgtgtgatgctgctggaatgaagacacaccacacgcatttaatccctctggctggaatacagacccatattttgtatacacctttaaggtaaaattagtttgtagagggaagcggccatgtttaaatgtaaggtctaattgaggggcagagaaaaatgacaaaaaaagaaagatctgacagaacgagtcaaagatagaatacgtccaacttttatgagaacaacgcggaaagagaagctatttaagaacagttcagggaaacatattcagtcagttacgagtccgtgccactactgcggtacagtgttgagtttgttcatgagtttatgcagttcactgaaggtcagcagaggcagttgagaccaggcaacgaggctacagaatattaaaaccaattgccagagttagtgtgaagccaagcagaacattcagacagaagttgagagaagccaaactgaatgtcagcttggaaaggagtttgaatgagaacagctgagatgaaccagccaaccacagttcagaaaagaactagaaagtgtgagcttattcatcagtatgcctacaagacaacaattatatcagccaaactcaagttacttttatagtatatatgttttcacagctaacaatttggtattagagattgaataagtgagttcttgctagagaagaccagctctgtggctccttaatgtcctcaattgcttagagttctttaaggttaaggcctcaagagcttttccttgccagaattgatgtgtccatctatgttttcctggttcagctcacatgttagtgagaccttatgaatgtagcttctgatattactaggagcctgggtctcatagcatacttccttagactagtacaattcctacatcccctctttttcaatgttttcttagcttttaggtgctagaattgtttttcaagatgtacctgttcgttgagtctgggctcaataaccctgcgttttggttggttgtggtttttaatgtttcctatctgttgcaaacagaagtttccttgacgaggagtaagaattccagttatttgtgagtataaggataaatatttagatttgagttatggatcatgccgggttagtggttgctgtaggatctccttcaagttgtcaactacacagaaatatttctatttcttttctctgaggcccattccatggatagatttcaacacctgcagttaacctgagaaatgtagacagtttatattttagtgaaaagactggaattaatctagaaaaaatatacaagaaaacattatcatcttaagtcagagggtagatgcttttcttaaggagatattgtgaatatagcattttcaaatgtatctgaaaagaaaaggcttctttgagtttcactattttttttttatgtctgggaaaggaaattgtgcatgatataacttttactgttgtaataaaggagaaaaaatttaaatgtatacatttttctctaagctagtattatcttttcattttatctaaaagaaattcaaagtgaagagagagagagaattcaagcatagtatatttgcttacttcctcacttataaaagctactgtgtatgtcattgaaaaaccataccatcaggagaggtaactacttatctgctgaagtcgaaagtgaaattcaactctttctttacttgtggatatgaaaatgtgacaaaaaagcacatacttattttgagagaagacagatatttctctaaaaaaatcttttcttagtcatctaagaatttttgttttatgtgttatagcattaagaataattttcaaattgaagggaaagacagcattgagttatagtgcataatgcaatcttggagtgactaggtcctgagtgtagtcattccagtcattagtcagtcaaaagttatatactaaaataaaattctgttctttgcagttgcttatactcaatataaataaatttaaccatgtcttattcaaatataggtaagctttctcttttataaaatgagcaagaggagagaagtctaggttaataatattggaatctcttcttatatattgtttttgtgtacagtttgacttagcatgatccttgtcattctaatattccttacagatttttgcaaaaggctttaaatattgctgatgccataaatgtcaatgtttgaatctccttaagtgtcccatcattttcaaaattaaatattaaatgtgcgatgaaatggtcagcatgcaggtactacttaataagaaacgtagtctgtgacaacttcttttctcaacaatgtcaaaaaggctgtctaatcttcaaaatttcatgtgtgaaaaagtcatggatttcagattctatgcatcatagccatcactggagagtagataaatttttaaaatacattttatcacctctttgaaaaatttacatattgtgttttgattatattaattctccttgcccactgtcatgcagatctatgactaacatttacctaactttatgtctttactttttttaatgcattgagttctagtaaaacaatgtaatctcaagtatgtggctattcactcactctggtttagacaagtgaccaaagggtaatttagttataatagaagagtttaggaaagatgctagaaatgatgataatgacatcagcaataaaaattataaactccaaaaattagctttttaaaaattggtttatatggctaagaatctaacaatctcatagaaaatggcaaaccttatggcatgtacaaattaataaaataatataagaataagctatgtatcataatatactttgatatttgatttataattttaaaacttacaatgctgaaagtattaactgggcaaagttcagtgatttagccataaatgtcagtaagtttttaagaggatggcaagctgaaggacattaaatgtttcaaaagcttcgtagaattctgtagtgactaatttataaaactcctagaatcaaaataattgaaaacaattcccctgaaaataccacagggcatcttaagagataaaaaacattaactcttaacaccatgtaaaaatgtcactgaaatgccaggaacatttcactgttttcatttaattatggcagaagaattttgttttatgacaatgattagcccattatcaccaaaatttatgaaatcttataaacattgtacactctctaaaccattttgaaaatgtgacatagtgaataagatatgcatctaatatgcaaagagtgtacttaggtttcaaatagtcagccaacgaatagtataatggaatgtaatttcactgtattttccaacattcgctttttgttgaagatattttatttgaataactaaatgctaagacaaacaatactagttcttttctatctcctgtatcatcaccactagaaaccaccaaaaagtaaattaaaccatataggtcagtgttatgaatttccaataaattatagagatatttccttgtgtaacaaatacttgttgttaggcaatgaagcaatcctcagcaaacctgttaagggaaaattaatcgtttttgtaggtagaaaagaagtttctgtggtgatattttccttaaaataatcccaacatagtgaatcatagctaaagtcactcctcattgattcttgagtgcctcccttattccaggtctctgtctcatcctggagatgccccaacacacacatacacacctcctcacccctgtcagttgcagatttccattaattttcacagtcatgtagccatctctcctgtctttccaatacctgatcctgactctccaatacccttccccatcacttttccctgtcacttttctccctccagctgcctcgtatgactattttattgccccttctaagtgagattcaagcttccttgcttgggcctttcttcttatttagcttctttgggtctatggagtgtaactgttacctgtattttatggctaataaccacttataagtcaatacataccatgtatgtcctttggggaccgtgttacctcactcagcatgaatgatattctcaagttccatccatttgcctgaaaaatgcatgatgtcttggtttgttaatagctaaatagtattccattgtgtatgatgtaccacattttctttatccattcttcagttgaggaacatctaggttatttccagtttttgagtattatgaataaagctgctatgaacattgttgagcaagtggcattgtgatatttgtgcaacttttgtgtgtttgtgcacaggagtagcatagctgggtctggaagtagaactattaccagttttctgagaaaacacaaaatttatttccaaagtggttgtataagtttgcactccaccagccagggaggagtgctccccttgctccaggtcctccacagcacatgttatctcttgagtttttgtttgtttgtttgtttgtttgtttgtttttttatttatcatagtcattgtactgggtgtaaagtggaacctcagagttgttttgatttgcatttccctactgactaaggactttaaacttttctttaagtgcttctcggccgttccagattcctctgttgagaaatctctgtttagctctataccccattttcaattgggttatttgggttgttgaatcattcataagtaattactccataatttggacttatttttacaaaatcttgctagggaagttagaaagctaattataaatgttacccatcagaatttaccatgtttaatatatttaagacagagaacatgatataatctttataatcggtaaggtaacatatctatgcacctgcacaggagatggtgtgattaacagataaataacattatatttttaaattatgatacttaatgaatatacaaatttttttctgaattttgtgtaggcaatgttatagaagatgaagttagtttggctaaatgtgctatcttttgcaggatttatacactaatttgtgtaatgtaaaatcaaagataattattaaattatgagaattacatcattataggggatgaggtccctattataaattgaggaatttgatccatagtataagttccattcattaatgatagttatggtgatatatagtttaatatctatcctcagaatgacaagatcaaaagaatgtgtaattatatttacttctgaaagattatggttcatagttaaaacagaagaggcatcctgtcattttctaaacccgttaaatgtgacagaatctatttttctgccaagttgtgaggaccaggcagagagcaaatttgctgtggtcagctaagtgtaaccactgggcaggaaagagaatttaataatgcattattgttcttcactgaaggtgaactgttacagtgcctttgttatggcagactttgcctctgcttaggtttccagatgctgtgtagattacctgattaaaatctctaatgcatgataaaacgtaccaggtatacttttatattagttgaaatgcatctctgttaggaccataataaagaatctaattagaaatattttccaattatattacacgatgaattcatagtataaagagcacttgttatataaatgtagaataaattatatagttataaatatatacagcttatcttaaaccaatagtagattatttccttgacactgaaaataaatttctaatgtcatgatgtaattaagagaataatcttttaaatcaaggttgaatcatgccttccacatagtaaaactagatgagaccatttacagtagaattaattatttcatgactgcattattctcattgtcatatcgtttcccattacatattttttaaacaaggcaaagctttatgtccttaaaaatgttgattaagtatggtgatttgcagttggtacatttaaaaatattaaaaagcctttgtcacttttttatgatgccttcaatgaaattcactaatgtcccaaaagaattagatagatgtgaaatctttagtgaagagtgttgcatacatgtgggaaatttatacatgttaatgtgagttcttaatattgatcagaggtatcattaaagattttcaaggtatttgtgaatgtaatgtatattgtcacttctgtttgccagatatatactgtcatgattgagaatcaaacagataatttcaaaagtaaattctcagagattcatctttgttctcccaagcctttcaaaagaagtatttcttgaaatccataactgaaaaggtgcatacatactaatctctagttgtcattgttgaactttgcagtaaagaggcagagaaaagcatttttttttctgaataccaagagcatccatcaatgaatatcactacgggccatagaacatgcaagttcaaaagaccgaatcaaaccaggagttgacaaaaataataacaacagctgtgttcatgaaaagtgcttataaaacagcgaggagaaagattatcttccacattcttttcttcttaacaaagacatgtatctattatggagccactgaagtttaaattttatctgcacttaaaatatgcatatcaatatttagaatctacttcaaaatattaatatatataactgtgaaatccctaggcttgagaagtgatttacactagatgattaaatgaaataaatgaaatatcaatagctgcctaaaataatttaaacacttcagttatcctattgacttgacagtccccacccccaacctttttttaaaggatggtaaagatttagtaaggctgaaatagaactagtactgttttgataatgagatcttaattatttaattaaaatgagagcttttttggtaaggaaggcattgagaactgaaagatgctgttagacttaatatatttgtgttgttgctaaatattttgatgttctgttgctattgtattactcctgtttctaaaaactccagaaactttagaagattgttttaattcattgctcatctagagagttcatgtgaatattttaatagcttttgctctgcatttttattaaaatttaaagacttccacagatgtagtatcaaaaatattcccagtatctccttctttacacatcttagaggaaacttctttagtgctaggtcatcgtgagtcaccgtaactctgtctagatgctgtggttcctctgacactcaaagatctacagtatgaccttctggaatgacatttcttatctactaacattgtggacatcaaagctattatagtgggcaacgcagtacctttcaggctagagcaaagtattccctaacttcaaatgtacttgcagttgcttagcatttggcttatagttaaatgcattcacataggctactttctgaacattcaatggactctctctttctcatctaaatttgcaagcatattctccatgaagttcatctcataccacagtagtatttcttgtcctttaaataaatgctcctccccaggccattgccctttcagcgcttcacactgattgtttctaagagtgagagaagaaagggtattgaaataactcaaggttaaaaatctaattgaattttcgattgaaattcttgatgctgtggtcagtttcattagtttaattcaatggcaacatgtgagcatagctctaaactctatttgtttgtgatattcatttacatttcaaatgatatcccccttcccagttacctctccacaacccccatcccattcctctctcctccctcccctttgtctctgtgaggaagctcctccattcactcagtcactcctgcaccaccatcctcctccactagggcatcaagcctccacaggaccaaggacctccccttccattgatgtcacataaggcttcctgatgattttctttaattttagaacgacttaactcatggattgacatgaaacactaataaagacaggcagattttgtgtaatgacatcattgttgggtggggacatgaatcttggaaagccttttagcacagatttttttaaaaagtgcaaataaggagtctgtgttggccactactactaagcatggagcctattctggagggtggttgatagattcattcactctcctttggcgaaaactgaatttccatttccaaatatttagtaattacaaatagcctctagattaggggtggggatctgtgtgcacttttttcccccatgctgggatgttttgtggttagtaccagtgtaggttccttcatactggcagactctctatgagtccgtatgtgcatcagtacttttgactctggaaaggctgtttcctccttcttcaactattcgacactatcttataatctttcttcatcatctcccacatagaaccctgaagattgaatggaggggtatgataaggacacactactaattgcagagtgccctgaagtctctccctctttacaaactgcccattagtgggtctctgtgttattaccacctactgtgatatgaaactcctctgatgagggttgagtttacgcaaacctaaaaacaaaaaataaataaataaatttctttatatacattaccttccaaagctaaattaaggttaaaaagacaattaaatagactcataacctctagtgaaaaagaagtagtaattaaaatctcccaaaaatcaaacaaacaaacaaagggcaagtgtcaaagtgattcagtagagaattctaccaaaccaccaaaggaagaactttcaccagtaatcctcaaattattccacaaaatgaaaataaatgaatgtttactaaatctttttttatgaagccatgattacactgatcaacaaaactattcacatacccaactataacaacataaagagaatggcctaagaatatttcttatgaaaatagatccaaatagtcttaataaatacttgcaaccaaagaaaaaagtaaaaaagattacttactatgattaagtttttgtaatgccagcgatacagtggtaaaccaacatctataaaccagtaaaggaaatcaatcacataaacagactaaaagataaaaacttcccactgtcaataataccataaactaaaagaaagtcaaagcatttcccctaaaatcagggacaggaaaaggatgtccattgtctccaaacctcttgttataataccggaaatcttaagtagtgcaataagacaactggagaagatcaaagcaatagaataggaaaagaataagtcaaaacatttttaattatttatttacataaagtgtggtgtgtgcctgtgccacagaagcatgtgaaggatagaaagtaacttacaagaatcagttatctttctgacacgtgtgtcccagagactgagattttaagacttagctttcagggtcttaaactgctaaaccactggccctgtggatcaaagttttaactgcaataaagcttagaaaatagtttattactcttacttattcatgaaatgtcagaaacaggcttaccaaataaaacaaataagggcattcagcttttagagaatgtaataccttagaagaccagtaagtgtttagacaattttccttaactggtacaaaattttgactctaagcgaagaaactcttcagcaaactaaagtcttctcaattaagtatctgttttggctcagccaagttgggaggcagtacttaactattatttcaaatatttaaaaatagtctggaagtttattcagtgttaaacatattcataaaaatatttagtcatcaaaaattcccctcaagtttagtatatttgtggaacttaatcaaaacacataaagcctctttttctcataaatgagagatgttttccaagcactcagtacaaatagctgctatgtaatgtataatcaacaccgaagcatggtggtgtaagctgcaaggtactcatttgcctttattttcgcaacccaaaactctctgggggattcatagcagccttaacaaaggcacattggctcattgcttactttgtgcattttgctcattccatttcatttaaaaaaataatttataaaagtttagataatcattcattttgttcatttttggttatttaatagattacaactaagaaatccattctagaatttaatgagaaaccatagcaggaaatttttttcagatgagcagtagatttttaaaccttctataagcaaattgtaaataaatattgctgattaagtgtataagatctaaatatctaaactctatgaaaatactacttaaagtttgattatacgaagtttcagttagcatcatgttatatatacactatgagcgttacagcaaaaccgcaaaactttgataagtttgcttttgtaaacatcccttttgcattttatataatatcctggaatatgtacaatatccattgttattataataattttaaggaatataaaatgctgattttgttttaattattattctaaaggtacatttagatatttactatgttttcccaagtgatcttaccttgtttctctcagtttattagcatgaaaataaaactacctctatctagtagtttaacaaaattatttacatcaaaaaacaaataaatcaagtgaaccctaagttggaaaaaataccaaaaacctgctttgatttaaacagtttaattttatcctaattctggacttttcttcccctaataatagattaacacagacaagttctaatgttatttttcataattatgtgaaaaataatctatatacttttgtcatttaaaaaactaaatattcacctatcttatttccagaattgtcacttactaaagggttaaaattaaagtcttgtggagctatttttatttccatggtccttctccttgtcttgctcttctaagaagctgcagtgtaggcttggagagctgaaaaatgctgtttatgtttggaaagaaatgatgcttgtaattttgttatttttaaatgcagaacttgagtttgcggagacaatcttcctttccttaatgacgtctgtagatatcatgataatgtttctcctaatgacttcaaattcttcacattcttaacaaagtcagcaagcagacagggcagcaagcacaagtctactttaaggcagtgaactccctgttaaggaggctggcaccttgatggtatttcttgatgtttgacttttctgtcacttcatgtgttttgtgtttagtgaacctgagatgggagtaaacagtaataaaaaggcaaatcaacatgaaaatgttgccttgtgttgagaggacatttcagagatcccttatcagttgtttcattttccctgtcagatgtcgaaatcttttactcatattgcacagaaatgcaggtctactgatagtgtcttcctttagctaagctgtgaagaagtcaaaatttcatttgtaaaggcagttatcgccgagtgtagcaggcctaggttattggtccttatttagccaacctgaagataagatgtctaatttcctgactgggccctctccaccttcgcctcacacactgattattgggtacgaacatacagaaaggggacccttgttaaaaccatccacgtatgtttttcttcaatacaccttattctggaaactttggttgctattccttaaaacctaaagacagcgtagataagcacatgacagcaatgcattttatagtcctatagtcaaagggagacatggaacttttatttttgtacaaaatattgaaaagttaataaatgttcttaaaataattttgatatttgcttgatcaataagaagtgattttgcgaaaattatatgccccaattcaggggaatgccagggccaggaagcatgaatgggtgggttggggagcagggtttgggggcgggtataggggggttttcggagagaaaactaggaaaggggaaagcatttgaaatttaaatgaagaaaatgtctaataaaaatatggatattaatatgtggtcatgtatttatacagaaagcatctttacagttccatgttaaaaaaatttaggcagggtttctcctgagagacttgactttttctgttacatgtaatatttttcttttgtctacttattgtgacattcacatgtaaagtaaaagaaattccatgaggaacgttaaaaaacttgaaagctgactatcaaataaatgcataaggtcaatgaagtagaactttttgtcactcttgctagaaattcaaggaaatagcctttaaaatatgtgactaattgtttctattacataaagttaattagacgaaaattatcctcaggccctaaaaatgtttttgatgtcactgcttctatttaacttacaaaacaaacaaacacagaaacaagcaagcaattctttaaaacaaataatagtggttagttgtagaaatactgaaacccctattaattgtttataacgggaattaatatctgtcactatcttttgaactaagttcactttctatgtcccaaatataatatgttgtacaggtaggatcagaaattgttaacattacttaaaagtagacctggcttcattatttgatactgaaaatttccatttaactcataagtaaaatcaagaccatctgcttatatttgttttcttgttgtcatgcatgtcccaactattttaagatataaaagcaatataattcctaaggggtagagatgaggtcttgtttatttaaatatattcattttcttaaggataatgttgctcttacatatgaaaatggcaaacgcaaccaacactgcaagtaaacagaagttaaagggtatgtgcattatggacacagaaacacgaatacatgttagagtttttgtgttttgaaattataatttatgtgcatttctcacttccctattttctctacaaacattcccgtgtatctttccaatttggttctcttttgatgcagtctgttacttggtgcttacatatatatgtgtgtgtgtgtgtgtgtgtactctaaaatttgacactgggtcactaattgatatgttcttccctaagaaaagaagacatctccgctcccagctttacccagttgcctctcactctttgagtagcactgaggaggctcatgtgtttctcctcactcagtttagcatgatcatagatatcatctatcttcacatacaagcattaaggttggtgggatcttttgagtgtagcttatagcattattagaatacacaatctcatagcaggctctctgaccctctggatcctagcacctttcctttttttccctgagccttaagtatcagattgttttgttggtgcttgtccattgggactaggctctaaaactctgtattttgattgattatagttttctgttgcagtcaccatctatttcaaagaggattgtccttgactaggggtgatgaggacacttatctgatctgtgggtctaagaacaaattgtaaaattgttgttataatttgtgctgatttaataaagtagcaagtgtacactttcctctaagagacatgcttcactaccactgagtatttagctaggttagtagtgcaaggtgtgatctcattcttgttaaacaagtctgacgtgaccttagaggggtgttagttatcatcagtgtacatgtaccactattacacgcttagggctattgtgtcgtgttggttgttgatgtgctcataggcatcatagattggtgagattcttggttacctttatcctctgaaagtttgcatggaacattttggtgccacaaacgttagtcctcaagaaggagatgttcaggtcagttcaggctcaggcatccctgaatcctctttctcaagtgtgtgctgtcttcagctgtagggatggaaataccttctacctctggagggcaagagggcaacagaaatttcctgtttggggagtctcttggacagcactgcagaacaactcaacaaatggcttctcgtatttggtatagggcttttgttaggtggctttgcatcttgtaaggtcagcttctcaccaaccctgatgagaaatgtttcttcaaactgtacctgtatattttaaaacagaaccatgtgtgtattataggtttgattttaggtaaatagctaagaataagattccctatgactttatcagacatccttggtagttcaggataataggctatgctgaataggccgaagtggtgtgttcaggaacgcaaactcttaaacgaatgcaccaacacaagataacatgaaatttttatttctgaaagtatgaaatataattagaaccttttctcctcttctctctaccctccaccctttcctatgtacccttccgtattctatattaaatccatggcctctattattattgatatcaatgcatgcatatgtgtatatccttatacatttctaaatataatctgctaaattcatataatgttactggtaggtttgttttcagggctggccatttcatgctggagaagcaattgtgctcttccatggaagatcacttttcctgtcccagctttcctcagttgactacgattctttatgtagtgtttagaccctgtggacattttccaatgcactttgacatccccattgatgtagtcctcatccttgtttgagaagtcattttagtgagaccttatgggtatagcttctgatagtacaagaagacacaatctcacagcaaactccatgatcctgcagctcttacaatctttctgtctcctcttccacaatgctctttgaaccttgggtgtaggtatgttttgtaggtgtatttatttggactggctccacacatcttcatttgacttgttgttgctttaattcttttgtatattgtaatatgattatgtcatttcctccttcattttcttctgaactctgctatatatccaattttgccctgtttcaagttagtatctactttctcattgattcttgttacatatacctatgcatatgcatatgttcatctgcacatttcctaatgcatgtattgaaacatctcagtctgtatgttagttgtatgcctattttcagggctgaccattggtattagatgatgagatgtcgggctcttcccagctgaatgctgcttctctaactctctgtcttcctttggtacttatagtcctttgtgtagggtggaggcctcctggtcttcccttcattgctattaaaagtttaaatatctttctttctaactattttaacttactcaagtttggaaagtgagtttaagttttctgttttgattttttttgacatatattgtgtgcgtgtgtgtgtgtgtgtgtgtgtgtgtgtgtgtgtgtgtgtgttgaaataatattcacccactactagcctctggtatatcctttaatttctctctgaatacttttttcttcccaactagtctcttagtgactaagctattagataacatgatattccccactccagtcagcattaatcaccgttggcctctcatgagtggatggcaccaccgatggcttgaatacattttctccattgtctgaggatttgaaaatgtggtctctggtttgtggcattgtttgagcaggttgaggtgataaagcattggggagtaagatcctcactcttatcatagcatgttccctttgtgtcgtgcttggagccaaagatgtaatctctaactttactgtccctgccccggtgcctttcttgttggcatgactattaaggattctttccatccatttcagagcataagccaaaataaactcttaagttcccttgctcttctggcattttgccacacaatagaaaagtaactcatacagggtcttctgtccttggtagaaagctggagaactagatcttgcacagctattggctgttgtatatccatggtgcagcagcaatggtatctgaatgatagcattacacattcttgcctatagcttgcattttaaattctttctgcactctcttctgagttgattccctagacctttaaagggcaatgacgctactaatagagataccatcaacatttgttctcttcactctgaccatatatgagtattaaacatcactctctgcaaaggggaaatttctggtccctgctaagagaccttttaatatataagtctaagcaaacatattagaaggtagtttgacaagatgttcatttagggcaagatttgggtatgtgaactctccttgggttcatgtcttccctagccatagggtttttttccaaatttacagtaactgggtatgtgatattcatcatggaacacacctccaaattaatcttttctttaagtaaggaaaagaataggtgactagagagatatattacaaagaagagtgctcactgctcttacagaagacaggagttcaaatcttacactagacactttctcaaaaaaatatgttctatgttataaatttaagtcttcagcaaaccttgcttgagactatttttttttctagcaggataggccacagagaaaacactggacaaaaggaaatggacccagtactaattctcagatcttacacaagtgtgctggataatgcttaactaataaaatattaaaatactgtttaatatacttcatgaaatcttataacaaaaggttgcacagcttttgatacacggcaactgttttgttctcatttcttcaacctgaatttctatttttctatttatacttatgttaaatataaatgtttttcatcagttatctataagaggacttggttatatggtggacaatgaataattctcactaggtgcgagagtacataagatctattaattgctgaaagtaatgatactaatctattttaaaagaagtgaaattaacaagtaccatttatataacatttcatatggctcaggtattaaataaataccataatagcttacaaggctgaagtcattacccttgctttatccatgaacaactgggaggcgaaacaactatttcagtgtgacacaactatgcaagcaaactgaaatcagaatcattttctacttcagtagctgcttttttcttgaaccaatcttattcggtaaagaaaggacaccatcacacagattgtgagattaactataaatatgtgaatgtattgatctcacttctaaaccatagtctcctctgctgaatccattcctctgattctttcatacttgaagagttccccgttctagtcatcaaattgctttatgtgattggcttgggcctttgtgtctgggtaaaccctataacagaacaggtctttgaggcatataccaacatgtctcctttttgtctactagtgctgcttaaaattttaagttgaaaacattaattaattctcttacacagtaattttcatcagttttaatttgcagtggttagaataaaaatgaggtactgttaaaagatgtctgtactcttatatttgatttgttgtttactttaaacttagtatgtatcaatcaatcaaaatttgtcaggtgaccatatgcatgagaacaataggattcctataaacagaatttaccaaagtagacaagacacctttattcatttccttttttttattagcaacttccagtttcatgtcatttgttttagtttctactaccttctagaaaactaaataaaagccaatatgtcttctgagacagaaaaattgtttcaaatcattggcaaagcttaatgacttctgactgctgagatatgttaatttaagccagaccaaatgttcctcagctgcaaatatttggtgttgttcactgggaactggcaagatttatgagagcccagtggcaaagactctgtgctcacatgcctctcattgtaatcatttccacgttcactgatggactgcggaaaaagaaaatatcaacttttcagatactggatacttggctgacaatgagatttattttacctttggtttttctcttacatccacttgccattttcatgttaaatgaaattcagaatttctacctgacttctgagaatatacggtctgtcttttaaaatacattctgatattaccctgtgtaaaaaaggataaaacagatttaacagctcttaatgaactatgagtaagttctgtataaaacattgagtagaatcccatagtaaaaatatatacacattgttattctttttaatgtgtaagttctcttcactagtaatttgtcaagctttgtactgagagtaagcccacctcctatacttcttaaccaataccaagtgggtttttataaaaaatagttgagagaattttatattttttaaaagaaaaatgtgaaaacttaaatatacatgcttagatattaacattatttactattaagacattaattaatataagtaggtttgatactcaagaaagagttggagttaataacagaaacatcaccatgaatagaatttaaagttttcatgcaagatttgaggcaagggcacattctaaatctgaagaacttgctggaggaagcatcatgacatgagaaagctttgattcagaacaagtcttacacatcaccaaccactagtgttgtaatattagcgcaaaatggcctgtccttatacaacaataaatgtctatgtccgtatcctttgtgcaaccccttgtatattctaaaagattggtggggaaaaatactacctgaaaacccaatgggtgtgtggtgggtgtgggtggttgtgtgggtacagtgtgtgtagtgtgtggagaaagagagagagagagagagagagagagagagagagagagagagagagaatatgaatgttggggattcaacccagggacttgtactttctactaaatactaaacaaaatctccagtcattcatttttaaaaattccattcctttcattcacaatggaccacatttcacgatgacaattccacatgtgcatacagtaattattctctgtattacccttctttgcctcatctccctcctttttttcttcttttaatccctaatggggattattttttctaaactattgtcttaaatgtaagggtttatctaagcaggtaatcctatgtactaactattgttcataagactaaccttctgccgtctgtgctgagaaggcacattatgaactcctgtttaaaagatgacatggagatgaagagtgtttctctcttttcaattttacagataaagaataacgattctaagagcttccacaatcagccactgtgctggtgagcacagagcatgaacagtacacattcaaacactttcttctcttttgccttagcttgtgatcccttccccttgactataggggggactggagagcagctctctgcattactccttgttgaactacttaattatctatctgtgcaataaaagggaaagtgctgacagaatgcagaagaaaaatctagattcttctttggcaataaatgtgacacagattgtataaagcaatatttttgcccttgaaatgtttagaagtattgacaatctgtccagtaaattctcagcttgtctttaaggctagagcttctacgttcttagcatttaacagacagacattgatctcttgcttcttcagacatataccaccagcacgctggatttgattttgcatcaggaccttaaaattattcccctttatgacagtatcccataatttccatctaaaatgttaaagcttttatagcaaacttcccattttgaaatatgtatcttgaaggtgttcatggcttatcactggaaaatagcttaggtgttgagagataaatagctgaatcataaaattcagatttgaaaacaaaaatgcttaatctctatcagcatgggaaacattctagaaaccccttgacttaggaagccctctaggcttgttgtcatctttgtgttttggtacccaggttgtcttgtggtcgtcagtaagtttacctatggttgtgaaattgttcccaagaaaagagagtgatactttcatttgctaattcttaaatagtgaaagggaagaaaataattggtggcattttaaataaactttattttttggcaaatactaggcaatctagataatgttttcattgttccattagttggttaagaaatcatgagaagaaatagcagagggaattctttttaaagatttctttgactctctccacccacaggctctgaggaaggcagtaaatagtccatttttgttaatgaagcttccctcatacagctgggattgtttaatattttacgagtgttactttgttttgctctcaacgatctcaggcagttaaggatttatgaatcgtgtttttctcagcccatctgcggtttcctatcttccctggccttgagaatatgtttaaatttattaaagcgaagcaaaggctcattatttcagaggagagccaaagtgacacagtgaattggttattaatggaaaggcactgccatagggcgattgaaatttaatgatatcctacaagaaaaaaatgagggtgtcactttccaaaaagtcatgctaaatgccagcctttttaaggtcctgccgctaattttatgcctgcgcactgtaatgttttcgaaagcgtttaggaaacacggaccagtgactgtactgattatccttttcaccttcgcgcctggtccaaatgggtttgtgcagtgagcgatttaatctctaaatatagggaacgttaaaaaaaaataacattgctgtttttcacaagctaagggccttttgcaaccctccagagatggacttgcaaatatgccatctccatatgctctgagtaagctttcaaactggcagatccccaaaaataatataaataaaataaaataaaataaaataaaataattaaattaaaataaaaaaacaaccctttgatttttttaaaaacatctgtcattcaaaagatgtttgatggtcatagtctacaaattatatttaataatacttcactaacattcagctgaagtacaacaggagacttaggataattttgaggtttccttattgaacacacgctgtagattgaattacaatattgaggtaccaataaaccacctcatatctttttgcattaatacaaaccaggcacctgtgtattagcaagagcgctttgtgcatatgttgattcggtccctttagagtttccgattcagctgttttctgtactaattgaaagagctataaattattttaaaattatttcccaacacccttagaaaaataacgctaatatgatattagctgtacttctggacagtagactgtaacctctcatgattcccgagagcttgctctctcctcatctagtttttaaattttacttgaacttttcttcatgtgtggattcatcaaattcctttcctcaccaagttgtcctcaaagtgacaatgaggtcttcagagaactgctggggttcattccagaaaaagagtacaattgaaattggattctagttcaattaggcttgagattcaacaacttatgcaatacattaataatgtgaggtaaatatgaatatatctaatgcaggaacaacattggatccaatattaatgcctccttgcttacaattgctgaatgcaaactaaaatgttaatggtatatttaaattgcaccataataacatataattttttcataatgcatatggtaatattaaattgtccactggttacaaacagactttgggtgttgtttgagtttcttttttttctttgtttgtttgtttgtgtgttttgtttttgtttgtttcaccaatgtagctgctaaaggagttggggaattaatttaaaaacatatttatatttcattcaaaatcatgttaacaagatttcataacttgtggtcacacattggcgaattttttcttattttaggtcagggtgaatgtgaacagatgagacgcgtgctcaaatgcatcaagagaaaaaaatcattcggaagagggtgtcaaggactactatttaagttttcctaggtccttcacttcttttagcagcaaacttatcatcctataatcttcctaacaaagatataagcactgcagctacctagattttgattgcttcacgacagtttatggaggctgagcaatgacagatttcttcattgtctttttgccaaaatttgtcctttaagtcatttttgttgactgccccttttagcagctcacctcacaatgagagagaagacaattaatgggagggtgatttatcactgccaaaaactgtcaaggacttcagttgtagctggagaaaaagcaatttcacattatggcgtttcattctgaatacatcgtatttacagctcagttttattttcagagcccattatcaggtgaaacagttgcatctgaaatgttgtttgtgacataggtgacctgttaggatttgataagtatttacgccagagcacaaggggctcacacatctgctgttggcagaagcaatggaaaaaaataacctggaaatgaggcgtttgatttttctggttcctacactcgagcatctgttgctataattaagtggcattcagtaattgcagtgcaatggtgaaataaacataagcattcttgccagcttttaggattttgtgtccttacaggaggagagacaagaaaagtgacttcaagaagaacaaaagggtttgcagcaaagtttaacaattaactgtatggtcaaagacggggcaaaaccaacagtttcgtggtacaaaatagtttcatcagaaagaaaactagtaagcagttttagaaggaagtctctgtaacattgaacccctgaaaggaactttttatctgtaggcatgccaagggggttaaaaacgactggataactgacatcatttgagaggaacagtaaaactgaaacacagccgtggcagaatttaatggcaccatgtcatggaacaatacaaaccaacaaacacaacagagagagagattacaattgaattagtaaactgggttttttatttggtagggtataagaagcaaatacatttgcataaaagcagtttgaaggccatgtgagtaaaaaaaaacaaaaaaacaaaaaaacaaaaaaacttgccctcagataatgtgagacttgcaatcagagatccatcccacataaatacacagaagtggtaaaatagaaccaattccatagcattctccacatgcctaccctggtacaagtaccactcccctctccatccatccatgcatgcatagataaaattttaactctttaaagaggcattatttgcatttctctgatgattaagcaaacacataagtggatgctcacagtcagctattggatggatcacagggcccataatggaggagctagagaaagtatccaaggagctaaagagatctgcaaccctgtaggtgcaacaacagtatgaagtaaccagtaccccggagctcttgactctagctacatatgtatcaaaagatgacatagttggccatcactggaaagacaggcccattggacttacaaactttatatgccccagtacaagggaatgccagggccaaaacgtgggaatgggtgggtaggggagtggggggagggtatgggggacttttgggatagcattgaaaatgtaattgaggaaaatacgtaataaaaaatattttttaaaaaaatttttaaaaagaggcattatgacagattatttgggggcttatgctttctaagagactggaaagccatctttacgggggagccgatgttaggaagactgtgaaagactctagagaatgtttgggaatcaaatcaacaggcctcaaacacactaccagttctctgacatcagcgtctcaatgtggacagaactgttgtgaagtttttccttgtgcccctctcccatgggatgccttcacttgaaaacactgtccaggaaggccaagggatgttatgtacattagccaatctagactgtaattgtttgggagaactgtgtagaatctctgtgcttctctgtcagagatgcttcgtcttgagtgaatattccaagcctggcagaacaatgtcgatttggttattatactggtgtagtttgcagtttcctggaagcatcccatgaggaattcaattgtactataaatacttatacacaatggcttttgcaaacaagctaaacatacaaaattcaaagtgttagcatgcaatttttgtgttttctatgggttctgttttattggtacagacagggtggtgaagcgggggcctctgtcagctgcccgggaaagttgaagtgttctgtcagctgccgcctgtgtgatttggcatttctcatctgaggctgtggcataaggtgattgtttcgctttctggatgaagaggagacacgaggaatcagccatgaagacatgaaaatgatggattatggcttcataatgtcaaaaaatgttgagtgtctgcttaggagagagcagcgtataaagacaacagtttccctgagtttgaaaggttaaatgatcattatgtaatctcttcccctcttccctagggtaggtaggtggctttaaagtgtgttttaaaataggctcagaagttttaatcctacctgtgctgtgctgaactgtaatgagctgcaaagctacagcgcacctacgtgcacttaaacatttctttcaatattgactcccatatccatgcactgtaatcgggcaataccacaggcaattgtggaggggaaagaaagaaacttgtgacctctgctttccgtctgctttcaaaagatacgaaaacggtagcgcagtgtttttgtagtgcagaatgcatgccaagttctattctcaatacttgaggttcagtaatttagccctcacttcgtctttcaaggaaccctttgtacagctacctctgatttacagataagcctatcatggaaaagtggaaggcagtgagcactcaggtgtgggaatgagtcctagcaatttatctctgtagactcggcttctaggcatgctgtcattcactcagtacattgacttcggcaggtaccaagcttatgcattcaaagttccatagttgtaatgcacattagctttacatatagggaatatattattgtctaaatgtgcataagcactatatcttgagtatacatccgtctgtttacttaactatgtctattttcctacttaactattgacattgttggatataacaccatgttaatcgatctcccctcttactttctcctagtgcaaggatgggtctccgtactttcttctttcagccatcacaactaaaactcttctattcaatgtatattttactctttatcttggatgaacgatttcccagtatgtattttgagatttttatatacattaaataaattttactttatctatacatttataacctagatttaaaccaattgttctactgcaatcactacttcttttataatctgaatgaagctttagaattacgtttacttattttttcagtcttatggacacttcatttaatttttccttagaaagactttattttcccctctctaaaatgttgtttacagttcgggacaagcttcagtgtgtctaatctcttccctttggtagtaaggaaatagctacagtcagttaacagtgtaaatgttggttttgtagtaaatgatccttttgaagttaatgcccatctataaatacatgctgtgtgctaaagaataacacttttacataacctatagagtcataggtgaaaaccggacatttacatccagaatgggcctcatatccacctgtggcctcattacatgacagtgtagggagcatatcctgttgtactgtattagtctttgtggaatcacaggatgaggtcacttgtatttgtggtgacgtataaacagacatatatactgcgctgccagcattttaaaggaacagatcatacaactgtgcagactatacagtgcataacaataatattcatcatcatcatcatctgtgttctagttcatatacctgctgctctgtagttgtgcatcatttcagggatattgtaaaagagagactcgtatgtcttagatcatgctttgattgcatcaagaagtgatgatgtctggcttatctaacctaagtttgtgtgagaatgttctgtgaacttcgtacattgataaagtcagaaaaatatctcaaactatattctcaatagttatgccattgctacaccttagtgtagattgatgccattttccatatactcgaatgatagaacaaacacttgagtgataagttgttatctgaagtcttaatattatgtactgttatgtacacagtactaaggaatatttatcttattgatttcaatacaactagttcttacaagaaaacttttaaattcgtcatgcgtttttgcgatttttgataattctttccataaaatattaaagtcaggatggtgagatggctcagctgcaaaggtacatacctccatgctcaaggacctaagttcaattcctgagcccgacgtggtggatctgcttcctacagttcttcctctgacttccactctcgcttcatgtcatgtgcacaaaggcacacacacacacacacacacacacacacacacacaataattcaataaaattgcagaaaaatgtaaaatcttagcacacatgctttatatataatctgcaaaattcacgaaaacagtagaaagcaatggttgaaagcaggaaccaggttgaatgaatgaatttgttttagcttcatgacgcaaagcataattggcatggttttaactcatccaaactattttgcttgtcttcattttacaaatgagagatggaaaaacaacttgggtagattttggaaaaaattctgtaggattttgtaagaacactcacgtgacagagacacaaataatgtttatggcaaaccatcaaatcaatagagatgttataaaataaatgttcattattgttatttttcactattacaagaaaagacatgagatacaaagaaaattgaccccaaccctgaacaccagttcatctttcattatcactgatcattctgcaaagagacttaagttagagttaaataaaaatcacttgagtgttttataaacaacttaaaaactattttatctcatggaataacattataaatataggttacagacaattaaaaacaatactatcagcccattgcctagatactaacaacttggtaagagttaagtaagattcttagaaaaccagagctggactgttaaaaaccaatattataaaatgatgcaactggccctgttgtatcaaatgaactcaggcaacgtctcctgtagagcatgacacagtgaatattgtaggctttatggatcacaggagatcttctatgacccctcagctctgctgtggtggtgagaaaacgggcatagatggaaattgtgaatgattatggttccgatataatgatgccaaatattgaagtttgaatcatatataatattccacgtgttgtttacttttttatccacctttataggcagggtctcatttaactcaggctggctttgaccttgctaggtcacctagaaaggctttgaatttatgatctccctgcttttatttcacagacaatatgactacaggcaggtgccaccaaactttgtagtgctgagaattgaccccaacatagtgtttatgttgcctaagcattctattaattaattacaagctcttccttatttttctatatttagaatgcaagaattgactgcaagtagtggcacatgtctttgatacataggtttaggaagtagaagcaggcaggcttctgtttccgggcaatctggtctacacagtgagtttcaagctgtatatctcctggacccagagtgaaatcctgtctcaaaccctccaccaaactaaaacaatagcttgtaaaacctactagaacaacaacaaaacaaatcaaaacaagcattccaacttcagtccatctcagagtaaatagtatgaggcagtaggctagacaaacctgtgggccatagttttcctattacattttaagaacaatgttattgtctgtgctacactctcctaaaatattttattccagcaccattgtcatttgcttatttcttggtaatctagaaggttctaaaccagataatgtattttcttctattcaagttaaattcacttgaaagaagagaattaataaactagaagctgaatcggaggcccagacttcttacacatgaatgctgagcagaagcaattcaatctacatcatcctgtgtgattgtcgacattttctattaatcagggtcaatcaccgaggacaatccccttacatatgagagaggatactctagagtagtgagtcacagtcttcccaatgctgcaaccctttaatgcagttccttatgtcatggtgatccacaaccatgggtcacaatgaaaattatcttcattgatagtgcctaaatgtaactttgctactgtcataaacaatacagtaaatatctgtattttttggtagatttaggtggcccctatgaaagggtcattagatccccaggttgagaaccaaaatacaaagaatagctactattatcggtaaggtcatctttatatcttctttggttattcagaaaaaaaaaatcaaactttgaaatattttcatccatgtctaaacaggattttattacactgagctgacttaatttgtctttgtacctgctataaggaaataatgtgccaatgtgtaaaattaatttcgcttgtagagatttgtctttgagctaaggttaacatggtgagcctttaactctaggattaataaatagcatggcaagacttctgggatgtactcttgcacagccatatataacagctgccaaaaatataccatgtcatttcctataaatatataacttaattatgtttctccagtgaagagtaatgtgctgaggttctaaatgtttgtttgctatctctcatatattgctttttgtttacctatagttgaataagttatgtgtcaaattccattcatgcctcccttctggaatggtaaaacggattgtgacagggatcatcacacttgtggggattttaatatcactgtttttgtattccatagagatttaaagtatgttccttatttactcttgagtattaatcttcagatgtttccaaacatttctgtttgtctacatagtaaatttaaaattgacttaagtaacatgtgttaggtttctaaaaaaaaatgtgtagcaaaataaataaataaataaacacataaataatgtggtctgaaagcctagaggactaccaaaacccccttctagctaacaggtgtttaatggacaaacattaataatccagcccttgttacagctatgacttggagagtgaaatagttcatttaaaatatcttaagcgaaaaaagttacagttgagttaattttgtcaataatgtgtagatttatgttatggtatatagtttgctaaaaccctagcagaggccataggagtaattttaattgggatttttacaaccatttgataacagtgttttgatcactatagttagggcagagttccaatagaggccataaagtctgtgcctaattcactgagtcacccagtccctgtcatatattgcttaatggtccatgttgtgaggaattattactgaatctaatgataatctttaaatagagaagcttagtggatgcaaaatataagtgtgagttgaaaacttaatgttttaagacaattattaaaacaactcttctgttatatgagacattcattttatttataatgagactcaacttcttaaccatatttttctatctatctatctctctatctctctatctctctctctctctctatctatctatctatctatctatctatctatctctctatctctctatctctctatcatctctctatctctctatctctctatctctctatctctctatctctctatctctctatctctctatctctctatctctctatctctctatctctctatcatctctctatttctctatctctctatctctctatctctctatctctctatctctctatctctctatctatctatctatctatctatctatctatctatctatctatctatctatcctatccatccatcatgtgtatatgtatatataaagagataaaaataagtgagtgtatatataatatatatgtatacatacatatatatgtgtatgtatatctggttctgatgaatattttaattttccttggttaatgtttgcagggcacttacagatgctagaataatctctaatgtttttgctcaatctgctctggagatggatgaaataaatagtttaaactaattaatgtaacaccagctgttacaagtgcttggcagacgtctgttcgttttgatgggcagggagcggctgttgtacttgactttattttagtacaatgttgatcacagtgtaagctggaataaatgacaagccaaaagaaaggctgcaggatggattctctgtaatgtaaggtaataacatgatttcttaaaagtataataatttaaagttagagagacttatgcaagacttcattaagccataatacttttgacagctggtaagttaaacatggttctaaaataggagttcatggtcatggatactgtccttgatttgtccagagaatctattagagttacaggtatgcagtgtcagctagactctctgtttgctaattaaatgccctcagggaaatgaagtaaaagaaacagagattctcctgaagtgggcttgggatttatttcacatgttattttaacaagtctaaagaaaattactattggggttttctaccttataattgagcatacttgttcatggtacatataagcctttcttcctatatggttcgctcatggagggaagagaaataaatttgcagatagcaaactctgaagagaaaagagccttaggaatggaatggagtctttatttgcagagacactttcttttattgtcctgtgatggagaaaaggtaattttctcaatttgttcatggtttccataagactgaaaaagttaaaatggccacctaacttccatttaaacattagcggctaaacccagtgtaattcttgcttcttaaaatctgaccatgttggcagactgagtcaggtgtatcctcacgagtttgaagccagcatgagctcacagtgacttaggacagacatgaacacatggtgaattctagaacaaacttggctttagagtttgacttttttcaataagcaaacaagccagcaaacaaaaatgcattaactaacaaaccaagtaaataaataagaacagagggcagggtttgggtctagtgacagaagcagtggctggaacctcagaatgtgaacacattaagataacagcaccaatccacagattgctaaccctgtgaatttgtctaataagttgttacaacgtgtgtggagcagatggctggtgtgctcttggaagaattgacggatgggatatgatgtcatcagtgggatgtcaaggttcacaaggtacttgacctccaagaataagtcctaactggttagaattctaaatagtgaactctagtgacactagctaaatgggaaatatgtgcaatttgtatttctttatggtggtgtttacccccttcactgaactccacataatgggatttttttccctgaagactcagagatattgttggagggttgcaccctgtaaccttctgaggatttcaaatacaaatccacacatctaaactttaacaaaatcacagcaaatgttatttatgaagtcaggttcagagctttgcctcgtttatatgtatatatgcagaaagaacttagttaagacatcccattaattttaacatgttatcacaaaatagcaaagtgctgactccgtgaaaatattcagtgcataaaattaaacttttatattttcattaaaatatgtttctatatatacaaacctaaaaaaaaaaaaaacctgtcaggaaccctgatgttgtctttatattttaattatgacttttcttgcacttacaggtgagaaacctaaaaacattaacatttttatttcaatattatcgttttaaaatttcaaatgagcttagaatctattcagtagcacctataaattatcatctcaaaatttatatgaccctggcaaatgtattatggaaaaatatcatagcatttataattacaaatgtggggactcaaaggaaatgtgggcaaagtatgataatcaggtatgtacattgtatgaaattaaataaagtaatactagctgtttgtaattgttttgtgtaggcaggtcctaagtaaatgacatgtccaagaagaaaacgtcgtagatgtgttaagaaaatgagcatttaaagcgtgaactcactgttcattaggtttctatatatactctaatatgagcattaaacatagagtaactgaagttatgttctaaaacataagtaagtgtaagtgtggtagactgtatttgatgttttctcactttgtaatgctgagttaactaattggcatttttttccaagaaatgatatatttctttgtatggaaggagatacttgaaagaattacattcagatcagtatagtgtaaaggaaatgtatttttgtagcatgcatattgtcaagaggtagtaatattatcatgaaacacataatcatatcctgtcaactgttaaagggattcttatagataaaatattaatgaaattatacaattcatacttttatcaaagaaacaaacttgaggcctaataacttattctgtaaatttgttcatttgataacttttcatcaactgtaatagcaataaaaagacagtatttttgatttattccatattctaatatgaattctagttataaagtccagaaattttcttaattatattacactgacataaacagacttatcctatagtggtaaatgctataactatgtattaattatagattacttttttggcaatatagattagagatttagttgtctatttggatatatcaaagtctatatatttaagccagttctaagttaaataacataatattatgtgctaatattacctagatgactaccataattaaataatattcagttaatatatatcaaatgatcaaaagagcttatgagattatttaataaataattcaattagctatgctatttttaatataaatgaaataactgaacccatatctcatatgactttggcatttagtattgattatatggctgaaccatttgcacgggttgccttggataatcttatctctttttctgtctgaggcagataaaatattaatacaaggtaaatgagtactcactgaacttgccatatggcccctgtggagggcagaggggcctgggcagactctggacttgccatatgggctgagagagaaaaggtaaggattacacagaaacaaatctaccatatggactgggtggagcacttgaaactcttaatactttctcatgctgggacatttttcacaaaagaatacaacacatatgaataatatattatacaaaaacctcttcaaaatggatcaattgtttagatttaatatgatgctttcaagcaatgtccagagcatataaataatcatggtttactttgaaatggcaaagaggatcatcaatcatttacccctgacatttttacattgcatttaacatctgttccataatagcatggtacagtaatacacttaacatcatattacatgctgaatccaaacaaataaatataacactaaattagagattctgaaagtttgccttgcttcaaataatatttttgtaaacatcatattatctcctccttttatcacttggagatttttgttgttgtttttctgttatatacagtagatgaaatgaagcaattggcaaaggcaattttcttggtacaatcaaagctcattaatttggtttctgctaatatggaatttatgataatttagcttgggcttgataaagtttacctttgtactagatataaagaaaagatttgctaagccaattattaatataaacaagattacaatgaacatgtttaacccacttaagagagcatagttttcaaggattttagcacattaattgaatgcaaatatgtactggtaataacaaatgagtctaatttagtcttgaatcagggtcctgtagtacctgcattgggtagcagatggatctaattactgcatatacttctaaattctgtgcatatttctttgtgatatcagttatttgggcatgggttggatttttgcctagccatttccagtcaccattatctccctgtgttttctaaagtatctaataagctttaattctttaaaggtgcataactttgtaaggatttgtatcctttaaagccttacccttctatcttcccctttaaggcatatcaactcttctagggggtttgaaatatgcattagaatacctataaatgggcattcagaattacaatttgacaatttgagatatatttgaaactacattgcaaattgtttctgcaatttctttgtgtttgtatttacacatatcttatgtgaaattgtgtgtctgttcctttttgtggaggccaaaggacaaacttgggtgtcattatttaaatgttgtctcccagtctccatttttgagacaatttctctttctttcctggaagtattctaaactagtgaccactgaacctcagagattcacatgcctgtctctacctaactagagctgagaatataaaaagttttagcacaccagcttttttagtgcgggatttgggaaataaactcaagttttttgtgtttgtcttgcaataagttttctgtcaggacctaaattttattctgacctttttgaccaaaaagaataagtaattcattcattcactttcagaagtttctttgttacaaattcgacctcatttaatggatttaggtctcctcttggacgcaagaaaagtaaaattaaaattaatatagtatttccattttattgatctatgtgacccagtatttatgttttccgatgaattcagcatagtttttccaatgccacagtgggtggttaataccttgataattttagtttatatgttagtctttatcttgtcacagtaaatgcaaactcagactcttctttcttttcaactaagttttgctttctttactattgtgtttgctaatatattttataagtcatggaaaatgtgttctgtttcaaattctatagctctttagttccaaggaataggatgcagatcacactagctggcattctgggggtagaaaggaatgccttgcttgcaaagtgtagattctggcaggtcatggctattagatgaaggtcagaagtgacagaccaagaatgaagaagaaaataggactttgagtgcaaaggaggttacctggacatgaggaactgggtcctgcattggtgcctaagacaggccaacttgaattggaaatagaaggaccaagagaaatgaatcgtggatactgtgcatggaaccaggcacacattgtgccatgaaatgagcttcagttataattttgggaaggtgttctctacaggactaggcaggagttcaaggactatgagaaggactagaagtcaaatcagattagatgagacaagtggaagggttataacactttatttttctactatttaaaatttgttttattttcttttcttaaattgaacataaaatttttcatataatacattctgttcacaatttcccttaccccagctctcattgattgctggtaagctaaattttatctgtattaataccagtaagggagaatgcaaagattgcatttatagacttctttctaaaaaaaaaaatcctagcaatcttttattctttgatatttgtccccatacctctttctttctttcctcaatatctcccgtaattctttccttttctccttccctactttccttctaggtcttttcttaatttaatgagctaatttctttctttactttaagagttctactatttcccaatagcccccttacatccacactagcttgaacacatggcttttggcaactgtagtgactaacaagatttcaagttcagacagtttcctcacaaaatttaattttccctccaaatacaaatatacctttaaatgatctgatattttgctcatctagaaaacaatatttagtgtcctgtagcaaattgccacaaaaggttttagatttccatgcttttatttttgtctacaattgccaaatagactaacgggaaaaataaaaataaaatatattcatacttcaggtttgatgtagctttataaagtgtcactaatttaaattatgattaaactcaagttgtaaaagtaattgtggtagtgaaggaagttgcagcttcctcacacatttcttgatatatttgaagctattgttatatgaagctatgattttttttctaatggaaaataacatcagtgggcatgagttccccatgtttaccactgcaatacaggaataaagcctacactttctaatttaattattctaatacgaaaatgctgtaatattttaaacgttcttactttttttcatcattgtaaaatcatcgtagaatcaacattctatacgattcttataatttgcttattgtaaaacatggaggataaaaggaagaaaagaaataagaataattgtccaggctttccctcctttttggatttttgaatcacactgtattaagatagaaaatggataaggaaagataatcgaatgactgaaataagaacattgttaattattgataatagactgaaatgatggcatttaaaacaaagtaacaacacagcaattggtgaactgaccaattgaagaaaatttgcaatcttcattcatttttacatattatctatttttaaaaacatatccaattaatagctaggaaatacaattttatacacctgacaacataatctttttttctgtggcacagagaataaatggctataattggaagttagttttaaaatatatatatgagcagctcaagaatccacattatgtttttatgctctgagagttgcacaaaagcagctgtgctgtcggggaatcccctgttcacccagggaagaatgctgacaaggacataaacacacaggcttaacttttatccttccctaaatcctaaaaattagtgctctcctttgcatttttatatgactgtgttataaagcagttagctttaaaggaaaaagtcataaaatatcaataggtaaaaggaatgtaaaggttacttactttaacctcctatcaatttccagggaaaagtttctgtaatattcctgatgggatgcttatcaagttttgtgtggacattctgtaacagctaggctaccattgtccaaaaggaagcagcaggtttttaggttgatgaacacaatcttatatacatatgcacacttgtttctcttctgaatatggtagtcatatatctatgcacttactaagaaaaaatggattttctcaaaattcattagagttttaagtatcacaggtgattttttttaatatgctgagcgtgtatttctgggacgaaaactgaaaacacaaatatgttttacaccagggagctggggtacatgctggactcttaaagtttagggataaactaagctctcttaaacatgatcaacactcgcataaaaacaggaacttcacttgtgaactaatttgggaaataaaaacctgacatactcattcagtcagcaataaaatatattacgaaccatgcatcaggatgctacaagtgaacaacataatcagaattcatagaattttattttaaacacactgaaggaaataaactgaatgtctttgatgacagttttcaaatctttgatcatttgaaacagtgcaggaaatatagactggtaattccttgttatgaatgggaaatgttttacaacaggaggctctagtgcattcaccagatttaatctcattacatatccttgtctccagataacttggtatgggacgtaaaaatgaagaaatattttgaactgtggcttgtatttcatcattatacttagcaaataaggaaactgacttgcatgaatcaattctgttaaatcaagacaaagatgtctagcttagaggaatatcctcgcagcctactgggaaaagagcagagttgtgaccaagaaccatagcaaccattagtgctaggactgaacaccctgggggcagctagggaaggaatggactctgaaactgagaaagtcatttaaaatgcaagtgtagtttttatagtggaaaatgaagcaaattcctagcaaggagcaccgagtaagtaaattcaggcggcccttcatcacaacaaactcaaaaatacagaattgtgatgattctgagtgtttgattgaagttgagggagaaaaatatatacccggcattctcaagtgaatctcattaatgataacttttgctttataataacaagtatgcatcaatttaaaagggttatcttcattgtaaactattcctcccaagatagataagggccttttggttacagtttgcatttggaggcattgtacagaagtaatgaacagtgacaacatttcataggctacttcctgttagtgttgctatgtctaacattgctggactgcaatggccccacaccaagagattctaaaggttcactactggaacaaataaccttgcttgaagagaaaaggatcatgtgtaagctgacctagtcgaccagaaggaatcttggctgtctaagatgatcattaaccgagtttaaggactaaattaacacttgtctgaatgaagagtttacattttctttctattataagctaatttttgcatatatagttaatatgtggatgatatgtacatgtgcacataactaatgaatcttaactagctatatattagttgtatttttacttcagagttaagaacgtcagctctggcagagagttatttggggtcaaaatccaggctgctgtcttcatagctaagttatcttcacaagttgatgaacatctttttacctctacattttcatgtgtagaatgagcatagcaaaaggaacccctcattcagaactgtgttgagagttaaacgagccaagtgatgcagtgtagtcttggacacagaactaagtggttaatgttaagcaggtgtttaggtggtgatggtgatcatcatcatatcggtctttgaacggagaatggtttagtagtgtttagactgaagagcatccattcatctgttaacagttcactagaagaaatttaaaatactcacaaaataagagtggtataatgactactatactcttttctggttttcagccttcataatcactgtgtcaaggagaatattgtaccatatttttttccacccagtttctcctcctctttgactttgatactttattttcattacttatttcactctatattttgtgtatgcttttcaaagagaacatatttcttcaattcacaaagacatgattgatatcatgtctaaatgcctaaaatgccatcccatttttagtggactttttttttttttggaagttttaccaactcatgtatacagatgtgagtctgttttcatgaatatgcatattctttgtgtcattgaaatcttctttccctgaacttcctattcattgacagcatgcctctaatgaaaactaaacaaatatctgtaaacttgcacttcaaaacattttggaataatcccttagtaggtatgttttatgtaaaaaatgaagaattgcttctagagatttccatctcacacacttataaatccctgataacttcaatcaaaaccccatgggagaatcagaggtttaataatccactactcagagctacttgtattatttcagggaagtttttctgaagtgttctgttttattcacttagaaatagagttcactttctacttgaagattcataaatgaattagaagtgagcagaggttttaagatgagaactggatggcaaaccatgaaactctaggttttcccttcatttctatctttcttttaaagtaacattaactttgaaaaagctttggacttaagtgacagcccctgctcatgcctcatcagacatttctaaagcaaagttcagaaactcacttttggcagatgtaaatttaagtgaattgtccaaggtcacagcacaataaggtagatttatcaagggaatgcagtttcctgctttctaccatccacaaaatgagaatggttccacccctaaaattaaagcttttgtttggtttgtttttatctttctgaaattataagtacgatttagaaattattttgatcattaactcaggccagcacaaaccatgtttccaagctagagaatagtttagtatacacaaatcaactgttactactgtatctactagagtctatacaacctgttttcaaaggcaagccagtctcagttagagatgaaccatcagattccttctctacatagtatgagatgatgaagaagccatctgtaggaacaaaactagtccagtttccatgggcaagcacagactaaagtacattattaaagaacacagaaattaaaaaaaaatttagatcagaagtgatgttttactgtgaggtcttcttttgggccttacaaaatgaaagagaagtaaccttgttctatttctgcatcctgaaaggaaaaaaaaaagcctcatagcgggcacatcacctttaattaggtttctgctttggggaagcattttaccagccccctttcatttatttttaatgatgttatcactaacaggcaaacagtcccttaataaaacaaaaacagtttctatataaagcctagggtacatgtcctgagtcagtcatctaaaaacaaatgttatgattgtttcccttgtgctctgagaacccttaatggccctactgtgcagatatacaaaacattaacccaggaaatagaaccctgtctgttgtgcagccttcaataaatgctttcccatagtctcttgcagtatcagcagtcaggttaagcctacagggtcacggaaaagtcagaaaggtcaattaaatggatcttttcagcacaccctgtgccagctctttcataatcattgacaactaactactttatgaagcaagcagagtgaaagcaattccacaggtttatgaggtaaatcagtgtgtgtgtgtgtgtgtgtgtgtgtgtgtgtgtgtgtgtgtgtgtgtgtttaatgattgaagttcctagttgctgagggaatgaacttgtatgcacaagtatctacctgcagtcataagtttgggttcctgggataaatttgctatcaacaataagttttaaaatattagtgtacagtctgacctttgtacatacatctcaacaatgaaaattcagacttcatagaaaactattttgagaacagtagtagaaaatatgctttctagttaaaattccattaaaatataatttcttcaggttctagaaacacagaatctcctgcatggttttcttatatgaccttatccctgctcctgcatagtctccaacaaaaattcactgtgtagcacctaccatggaaagttttgttttcttcctctatcctgtctcaattcatccgatgcaacataatctcttctttttctaaataaacgatttggagtagtcaaataatcaagttgaaattaaaatttgatgtatattttaacaaagtcatcttcctagcccatgatccgatctgtgaaattcactctttaaaggataacattaccttccaagagaaggtattttaattataacatcatgggtgcaatgtggcttcaagacaaacagagacgtcttgttcctgcatgtgtactcttccagatttgctgtttttttgttcattcacatattttgctaaaagaaattttaaaaagagctttgtctatctgaatcctcaagattataaatatattctctccttgtgtaaggagtgactcctaatacagtggacttaatagtttcaaagaataaatgtgcaacaaatctgaattaaattcgacaaaactgcacacttggtgtagtttttagcatgcttcaacgatctctataagtcatttatgtattattctctttataacattatatttgcatgtatgcaactatatatgtgtgtgcaggtacacatctgtgcatatattgatgccatgattaaatgtggctgattcctcatctactggctagcttatcttttaagacatgatcttttaatgtcctggcctacagagggtcctagagtcagttttcttggctccccagctctaggattataaatgtatgcagcatagcatattgtatctgaagactaaactcaagtctctatatctgcaagagaagtgttttcgcccttgtcctatctccccacccctccatattagtctctccaattttgaacttccaagttctaacactgcttagaatatattcacaaagtttcttggtatttgtatgctgttctcagtctctgcccatgaactccatcaatgtgatgcatctttaacacaggcttgttatatagtgagaagatagataccacaagcaacagataagaagacgacatttctctgtgtcatgtaaaaatgaggaaattcatctaagatttttttgatatttttattaggtattttcctcatttatatttccaatgctatcccaaaagtcccccataccctccccccactccccttacccacccattcccactttttggccctgagtttccctgtactggggcatataaagtttgcaagtccannnnnnnnnnnnnnnnnnnnnnnnnnnnnnnnnnnnnnnnnnnnnnnnnnnnnnnnnnnnnnnnnnnnnnnnnnnnnnnnnnnnnnnnnnnnnnnnnnnnnnnnnnnnnnnnnnnnnnnnnnnnnnnnnnnnnnnnnnnnnnnnnnnnnnnnnnnnnnnnnnnnnnnnnnnnnnnnnnnnnnnnnnnnnnnnnnnnnnnnnnnnnnnnnnnnnggggcctagcaaacacagaagtggatgctcacagtcagctaatggatggatcacagggctcccaatggaggagctagagaaagtacccaaggagctaaagggatctgcaaccctataggtggatcaacattatgaactaaccagtaccccggagcttttgactctagctgcatatgtatcaaaagatggcctagtcggccatcactggaaagagatgcccattggacacgcaaactttatatgccccagtacaagggaacgccagggccaaaaagaaggagtgggcgggtaggggagtgggggtgggtgggtatggggggactttttggtatagcattggaaatgtaaatgagctaaatacctaataaataatggaaaggaaaaaaaaaaagaaagaaaattgtatcttatatcttgggtatcctaagtttctgggctaatatccacttatcagtgagtacacattgtgtgagttcctttgtgattgggctacctcactcaggatgatgtcctccacgtccatccatttgcctaggaattacataaattcattctttttaatagctgagtagtactccattgtataaatgtatcacattttctgtatccattcctctgttgagggacatctgggttctttccagcttctgtctattataaataaggctgctatgaacatattggagcatgtgtccttcatcaaagattttttatttttctactttcacactaatgtttcatattttgcaaagcacctttgcatatataatctagttggattaaagcttaatcctttgattttgatctaatcattgttataattagccaaatgtgtttcatatgatgtaagatggtttttatcactataaaatttgataaaacttggtaacatagggaccagaactcactttctggacctacaattttatttctatgaatttacctgtatcatatatagggctgtgatctcttttattttatttaattttttaaaaagtgtagtatgggactggggagatagtgtagtgtttaagagtatattgcttttgcagaggacctggttcaatttccaggaggaaggctgggtagcatgcattctgttaaaactcagcacccggggcatctgacagctcttctgatctatgccgactaggtcataaatctgggaataattttcaattatttatatgagcaccttcatttaatttgtaagttgttcatgatcttatttttagttcaataatacttctattgaaatatttggttgcttacagtaatgtattaaagcaacaaaaatgcatattatcataaaatgtattcactttttaatagaaaatagcatattctcttacaatcttgctcagcactttgttttttcacattaccactacatttaaagtttacatgcaaactcccttttttaaatcttggaatgggcagtttaataaaccattccagatcagcatagccacacacatacctgcccctcaccctcccacacacacttgagagaatgtgtagttcaaacccaaagggactggttatgagaataacaactgaattagattttattaacaggaaagaaaacattttaaaagtagaggcccattattattttaaacaacattgttccttaggatatcctgctaacttgttacgtgtgataagattaaagaggaaaggggcttgtcttttcggggcatcaatcttcctgatggcctctcagtaagaaacggcctaaagtttgagtggaatctggggttcaggtgataaggaaaactaaaaaaaccaatgttttcatcctctatgatataattgaaatgtttttcttttccatttgtaagttcaatttctattatcctgattaaataatgataaaattgccagtgtatttattgtgtaattattcagatttcaatcagtaattttttccgagcattaaaatgaaatgacttgttaaactgtagcatgtgcctttccattttccaataatgcttagaagttaataacttctttttaaaatttaaatataataacctaataggtaaccagcatgctgtggcatctagcacatgctgagtaccagaatcatttaagtgttactacagtatttcttagtatctgccttccggcacatcacctccttcagaatgcatctgcatgtgtcttctccttttgcaaatctcgcttgcctttttctcttgaggttacaagccattggacttaggttacattctacagaagaaaaatctcatcttaagtgtgtgagatacatctgtgtgtgtgtcaggggtgggggtgggggaattttccagataaaataacatgacaaatatggacacatgaattgatgaccaccattcaaaccacagcaggagtaaaaaagattcccttacacaagtcttgaaatttctggtcatttacagccaggtacaaaaaccttttgataaagggcataataatccgcaaattagaaacctagccagccaattgtcgtttatggacaatctcttacacactttgcaggtatatccaatgcaaatccaatctgtaaatctgtgttcctcttccctcccactttgaagttaacagagtctatgtggtgctcagactaccacatgttctggcctccaacttttgctttaatcttctgagaacattttacatgtcaaagttcattttttttttaattcgaagagagaaaaccatggccttatatgcatgaaggaggcagtaaagtggcttctatgataccaggttccatgaggtgacagtattgtttcagatagcagcataacccaaatgaatacatatatttttggtttattttatctctaagtaatttgctttatttttctataagaaaagtatgtattaaacttaaaaaaaaaccttctctttctattttaagctgttctgcctaaaatttatagaaaatgatagtttattctcatgtatgagactaggtgaatttgcaaaagtaatatgcatgcacacatatgctttcacatgtatgcaaaagagtcttaatcactgactgggatgagcagtggctaattaagttacaataattaagttaaagtgctttaccaactctaaaaattagacatttattgcctggaataggtcactccagtctatgtgaacttcataatgtttttaccctggaactttttcttccaactctatcatggtgtgcattgcttcgctaattaacagcgcatgaatgtcggtatgttggtgatttaaggttttggctctcaactgctaagcacagtcaagtataactgcattgaaattaaaacaaataattatgggtaatagaaaatatgaaaaactgtgtgtataaataaatttggttctcatattttgcacagtctatcaaaattatgaagtcgtaggtgctaacaggaaaaatcctcaggtggtcatcagactctctgcctttcttcaaaagacaagcaattactatccccatgatctattaaggcacattttccttaccatgtgacagctaaggtgaaactgatcaaaaaatattgctcccctttcttaaacaatgacacatgaacatagatgtttaataagtgccttttcagaaccattataagaaaacactagcagccttggtccagaaaagtaatttatgacagcaaggtaaatggtgtccaaaattgccttacagatattagccatggggtagcacgacacaagcctttctctaccctaggtgaaagctctgataaaatgaggcatcttgagttcgggcttagttgcttattgtttctgcttcaagtacatgctgattgagatcttctgtcagtgagttaacagaggcagtggaaggagaaattgcagaagagttagtgagcgttataggaacatagtcaataggacatcttctgtctctcacatccctccctagcttcgtcttatttggttcattgactaaaagtctggaatggtgaggtatatcatttactatgttctgacattaatgaagataataaggtacggcaccttctgtgatatccctgagagagagacagagagagagagagagagagagagagagagagagagagagagagagagagagagagagagagagagagagagatttggacaagttgctgtgtgaaaaggtactgtaggataaaataaaagaattattgagaatagtgaaatcaaattataagcaaaactcaagtatgctggaatttttagccatttgtagaattgagagatagtatcagggctaagcaaatatattgtgctgattaattttcttagtgtgaaatactaaaatattttaaaatagagattactgccctaagtaaaacttctgtatgattaagccaccaatactttccacttcctttgaaagtatttaagtgtttaaatcaaataataaagagcaaaatgaaaactctttcaaataaaaagaaagagtacttgtgtttggttgttactctgagttgcctaaattttgaagaatatggaaccatggaaagaaatgaaaatttacttcagaagggtaataggatttccattatactgtgctggaagttacattttttttattgctttttttttcagtttcctttttatgtgaaaacactggttgtttaagtttttaaaatacattttttagctaatgagagtgattattttaattgtaacttagaaacaatacttttggattccagccttcctgtttagatactttaaaaaaaatgaagaagacaggagagaaataaaagcaaaaggaggtttcacttgtagattcttcattaatcttattaagactatgtttggatgatagaaaggaagggttaattgagaagaaaacatcctgacagacaaaacatttctcttgtataaagctttagaaatactctattgtcaatccaaacagaacaaactaaaatgagataattgggaaggcgcccataaagtcagcctgaatatattatcacaactatatatgagataatatttgttttaaaaagattctatggcactgtaaactcagtctcattagagactgcatttaaaaggcttataaagttactcattaatgttatcttgttgtatctccacagctttttcattaaagaaaattcagcagaaagcattttctcctgatagcaggaaccaatttgcaataaatgttctggaaaccactggggaagccattactgaggtctaataaaaacagacaagcgtaacttgttctatatttttgtttcaatcacatacagatgagaccccactttccacaccaaccgcaagagacagcatcgacaaactttctctaactgggcatggacaaccactacctcccggcttcccatctccctttctgtttcctgatggcctgtcctccatagagactcttctcactaacatacaggtaggtttcttttcactgtgtgtgaaaggagcatgaaacacaaacacatgagaattagttttctaaaatacaaactatttcaaataattatcttgagactgtctgatcaatggtattaaacatttctacacaacattaaattttagctgtctacgctagccaaattcttatagaaatacacaacaaatacttcataaaggtccacaaaactgatgtgagcacttatgaacccccccccacaaactttctctttattgccaaataatgggaccaatttaagtatataaatttgtctgacttaccaaatgacagcatacaagttctagtaaatatttagatatttttaaacgtctggccttccagtgaggaaataacatgtttagtcattttaaatatgtctaacatagaagattactaaataatcgcttctttcataaataagtttgtttcagttagtaaggactcttcaaagaatagacttcaaaaagccatagaaatgtttctacggatttcctatgtggccctcaggatgtatattttacgtacagtacattatgaatcaaaaatacttagagttaacaataacatagtgcagggagccaagataataaaagtgtttgggatagaagaaagcatagttttcttgccacgcatgaagggatcatgtggaccccagatggagctttccccatcttaggaggagcttgaagaagacatgctgtcagccttgcactctatcctctgttatattttcttaaacacatttcctaccatattaaactttgccccagtagaaacgtaattaattttatttacctctccaaggacataacaggaggcctttaatgtaacatatcttctcatctattaatatggcatttttaatatgaatgtaattagaattgcaagaactgtattcaacattaaggtttttatattttggtaattgaaaaaaagtcatcagtccaaagtcatttctatcatggccaaattagtggttatatctgaaagtaaacgtgagacactttccctgaaattttacccatattacaagtaatgggtgtggttgggtgagtgtgtgggtgggaagcactctctcagaagtaaaggggagggggtggagaagagggagaagggaaggggatgggagatgtttagagcataaataaatgaaataatttaataaaagaaagagacagggagatggtgacagaaagacagagacagagagagtcagtgagagagcgagagtgagacagagtcagagacagagagagacagcaagattgtgacagagagatagagacagaaagtgggagagaagagggagagagcaagcaagagagtgggaacaagagtcagagagagacaacagagagacagaaaaacagacactgaatgaaaggcagacagacactgagagggacaggggaagacagagacagacagacagacagacaaagagacacacagaaggaaaagagacaaatttgggtgtgcagataagggggtagatctgggagaagggagggtaggggtgaatatgatttaaaaagatgtaaaattctcaaggaactaataaattaagaaaagtagagaacagtattttattctatgtataactccatattaagctaactttgaacagtctaacttgatttgaatttcagcaccaaataaaatccagtttgtgttacaaagcttcttattcctctgaggaacggctgcactctaggcctgaagactgtgctaacattcacagctctaagtcaagtattgatagttaggacgtatccatccatccccccacaggatgctatgagtacttagtctatgcatgcattcccataacttctaactaagtatttattttagaaagaaagagaaaatcaaacatacatattttaggcaaattaaatatttaagtatttaagtattctaaacctgctttctttttcaaacatatgccccgaggacatagcttagaaaaattacctatagggtgatacgcaaaacaagctaaagtattaatttttaggttttattgattgagatctggaactattaaagctagataatcaatttaaaattccttaattaaaaattatatgtatttacattagtcttagcatgtctatatagacataggtgttatatgcctataaatatttaaaacaccctcatgtacacattcatgaacatatgtatacataaagtaaaaataaaaaaataaaatcagagttccaaacacagagaaacaaatacaaatgcatacttataatcatatatgtgtgtgtgtgtgtgtgtttgtgtgtgtgtgctgattttttgatgatttaaagtaagtttgtaagacaccacagttgctaactcttattattggcccatttattgaataatggcattatccaaggtgtcatataaaatgcttaaacaatcatgatccgggcttattaggtatagaatatgaatatgtttgctgtctcaattttaatttgggtaattacaatctgcccacctcaatttttgtcttcaggtccaagtatgtataattgagttctctgctttctgtatcagaactgtaacacactcatatagtcagcttaatcttctatggttatctggaaagttccttgttgccatgaagagtaatttcccaaattcctttaaaatattgtttatagcatcgttttcaatgcaagtgattttacagtatagtatttgttaacaacttttaataattaaatctgtgatgattgctacagatgtgtcctccacaatatcattttaatggtttccatctctttctactttagaagtaagacttatggaaaatgtatttgcatgtaaaaattgaacactcattaaaatattttattaatgctttaagaattcaggacatagaagagttgtagagtttgatttatatcacttgagaattttataaactaaaagtgaaaatgaaaatacccaaaaatgaataacagtaattaatgctaagggaggaataaaatttcattccgtttctttttttagaacttgtatttttacatggtactttggtatatttagtatgcacatatttcaccacagctttctgtttgtgtagtccctggacagattacaaggcagtttaatatgaggaaataaatgttttagagtcaaatacttggatgggacaccttcaaatattggctgaaaatagagtacactcaataggattctaatcttaaatcactaaacattaagtcttagaactgacagtgtaattacttgtgtcttttttacccccaaaccagtgtatacagtgaaaatgcaaattcactgtagaatgaacagaagtgaagctagtgaagcagttcagtgggaagggcacttctgacttacacataatagagtttaagtttagattcataagtaaaagttgaaataaaagagaggatgaagacagtgcatttagttatagataaagttatttctaaagatacttatattaaagggtattgacagaaagagggttcatggtggtttgtgtgcagagagaagtttaaaaaatggcattggttcagtggtagagtgtttggcttacctagcatgttcaaggccccatgttcaatcttccagtgtcaccaaaaataacaccagtaaatcagaaattaaccaatgaagaaaatcctaaaagagatggtagaaggagaaaaggacagccccaattttatttactctggtttaatcattaaatataacacaactatggcgtttgggaagcactttgcgtttgagtgtgagaggaaatacaaggaaatagaactcgcctaagtatcacgactgagaaactctcattatccatcttcgaaccagcatcatcatagcacacaactgttttacgttgccttttatattctgtgaaaaaatgaagagcttgtttacttgccttatttatataaagtttatttaaacctatctagaaaataacattataaccaaagcctggctaggttaaagttgccaatattggtattacatcctttatgattatgtaatgtgattttctttccttttttcctcatacaattttgggcaagactgaagtaaaaataatgctaaagtatacccaggattctgaacaccaccgtgatggtaacaacaacgacagttcaaatcctggactatatatcttattggctaaacattatttacagtagcaacaatactatgatcagtactagtaagaaaatatagtgtgccaattgcaatggttctatacagtttaaaatactgatgttaaaattttgtacatgtggttgtgagtaaaggagggggttgtcatggtgcacacctggaggtcagcaaggaacttacaattggttctttccttccttccatcatttgtgtctggaaactgaacttagttcatcagacttgaccgctaggccctatatcccctgccacctaaccacataccgttctattttacaatgattctcctacatctttggatataatggctgtgcatataaggatagtgaggtagatatgggaatagtgatttcagagcactggctgacttactataagcacacatgactcacaaggtgtgcttaaacacagaagggatatttcataggaagaacgtcattgatcaactttgggaaactctgtaatattagactgagaagagatttaataatacttctgtcatagatcattacttcgtgctgtcattttttctttctattgtcaaaagtctggttttcaggactttcacatagatgatgctctgacctaaagccctagactactaaggtcttaggtgaatctctgagccctctggacctttctcttttaagttttaatattttgttgggcaaaagaattgcttctagtcttcctcagatgggaagttttactcattttctctatggcacattatttggtagaaattttatgtcactttcaaaaacaaatttgaatataacacaaaagtagaatagaataaggaaacttttactcatggagagagctggtgtgtctaaaacttggtattcatatgagaatttctggaagtcctctcatgtgctgcctgaattgtagaaactgtagtaacactgttaagctcactgcagtcacccacctcggcaattttatgaggtggtttaccttctgtgggggaaaagaaagaagagaaaatattttagctaataagaatttctatgatcatgaacatcaatcataaacattgtgaaaataaatctgtggacaaccaaccattcattgtcttaccattgttgtgcctcagaataaacctcaactctatttccttagagccatcacccaaattcagtgttatgagaatacaaagaccctttagaggaaaaaaaattcatgcttgaaaccttcccctcttaactgtggtataaaatgtcatagcactgggcagatatagtccttccatgtgagaccacatggttactgtgaacttctgcacaccacctacttggaactgcaacagaatttacacaaatttgagaatattgggacggagagtcaaatggtgtcttaagagcatgtagatgttgcgaacactgcttggtgttgcttttttccagtctcccgttgcactgatcttgaattagcagtctgtatttacattgttatgcacagacttactgctggtgataccttaccattgagtatgggtgagtctggtccttatgcagactttagttcacactggactcctactgatgtgcttaaatttaaagtctacattttaaatagttatatatagtctctattgagcataagatcctaaaagctaatgtttttcagacacaatcaaaacaccattggctacagttatcaataactgtaacaaaaggataaagtaaatgttaatgctccaagcaacttcatcctttacaaactgatattaataataaaatcacacatattagagcttaacattagtcaagtgtttatttgtaatgattatttcatatttaagaacaccaaaatattgtgtcttgtcacacaaggacaataatagtttaatagtaatttattttaaacagctactgataatacaaccaatcaacacattaagtggtgccaacattggcatcttgctaaataatctctagacattgcagtgagagtacatctttcaaagataagtcaacaagagcaatcagagcagaaaattagaatttggtatcttagaattaaaatacagctaaactaaagttttaattggggtgatctaaaagggcacttgatgtaatgatctctttcatttgttactaattgtttgttcctggtgcagaagaaacatatacaggaatgttactgaattcagttaagatgtcagtttccttagaagctgtgttttattattaagcaaccagagagtgggagtgaaagagctgctacatagaaaaagaattaagccagaaaactctaggtcgaacatagcacacaataattatatatataatggttttgagtgcattaagagttacgctgttctgctggagacagactatctgtctatattctcgttcaagtcaagccaaagttgaaattcctggttcaaagttttcatactaacttaaaaaaaaagttgaatccttgagaatgtctagcaatggcattaaattccacctcctgtgtaatttcaatagcaaatttcagactggcacattcacagaccatgacaaaatactttatactccaaatatagcattttgcattgctgaattcatggtgatagaatttttaactgcaattttcagtaataactttggacctaaataacttctctgacaaagcacacaggattttttttttaatatgtcgactgtgtgctcacattttacatttaaaatatgaaggaacagctaaatttgatgaaaattatacatcagaaaagtacatatccctatgatcagttgtaaggctaagtaagttttgttttcactaaactcttacttgcctgtgacattctctcctaatattattctcagattattaaagtacttttaaggttttcataaagatgactgatagctaatcttttgttctagatgccttaattatattatgatctcaaaaatatagcagaatgatcattttaatttttgagtattttaatattttatgggcatggtttgggttattggagactgagtgctaaatggtaacaaatatccttgcctttgtcaaaaacttacattatcatggaagagggatgatataaaccagtgaatacatagatatctagtaatattacttaattgtgaacctaatcataatgatcaagaagggctaacaacatctgcatgaagggcatttctggttggatgattagagaagtcttctgaattgtagctttaggcaaaggtaaagtaaaatgggggtgtgagccgtgtgaagttatagagggaagagaaagcttcctccagcagacacagatagcttgaagtgaggaacacaatgaaagacagcttttgtagggaacaaaataaagggaggtcctggggagaagttggggaggaaaagggacctatcatctggccagagttcctgtgctctgggcaggtggatgcaggcagagttgctagacacttttccactcagcccagggtgagcatgcctgacccacacagcgggggaccccgaggccataccctgtagccctggggttattggagagagggaatagggaaagaggttcccaacactggtgagagtgttgcagtggatcttgatggagcagagacactctggtttaggagctttattgaagagagagagggagagggagagggagagggagagggagagggagagggagagggagagggagagggagagggatagggagagaaggctagagtgannnnnnnnnnnnnnnnnnnnagggagagaaggctagagtgaaagagagagaaagagggagagaggagaggaaagaaaaagacaatgagaaagaggagagagaagtgagagaagtgagaggtaaaagaacaaaggagtaagagcaagagagcaaggtgggggcctaaaagccccttttatggactttattgttgctaggtaactggagaggagtttagcctgaaggtcagaagcgtgggccattgcttttacatgactacctaccatgcttctcttgtgcaggttgtgggaggtggtaatttaggcaggggccagagttacaggatcatgagggaacgcctaccatgtcatgaaggtgaattatgaccatcagggttcagacttcagctcaactggagaccagcctgcaattccctacaagttttagagggtgtgtccttgttggggaatggttgcatgaatttgaagatgctgtcagcctaccaggccacgctggatggctcctgtagaactgttgcctgcaacttttcccatttgtattttatagtatgctttggtgtgacacttattatctttttcaaaagctaaatagtctacttcaaaccaatgaacccacataccataaatacttgtctttctaaatagtttaattagacttagaaggttttctagtttgttttaattgttgtatttatgcatttgtgtttgcaggaattgaatacatccaaataactaacaaaatgggttttataccaaaatatccttatgctgaataccttctttgtccagggcctcttgaaagttgccatagacaatgccagagctcaagaaaagcaggtccaactggaaaaaacagagctgaagatggattttttaagagaaagagaactaagagaaacactggagaagcagctggccatggaacaaaagaacagaggtacctgggaaagtccacacaattccaaaagtttaagtgaaatatttgacataaaaatactgttctgtgtttggttgcttactttaatttttgctacgttgcctgtaacaaagctcagaatagtacttgattcccaagtctgttgtatttatgaatgttcaaagtccatactatcttctgttttctacctcaggattgggtatatctatccatatcattgatcatatagttttccttgcttatagggtttaatgaatttatattccttacggtaagaatgggctctgataagatgagaactctgaagaagaatgttgtgttcactcacagttgctctttgaaaaacctcaggagttaaagtcataaaactaaaatagaaaagactgattattcaagcaaaacaggtttggtgagatacttatcaactgacatggaagcttgatgaatatctgagcaaatgactgaagttaagtgtttgtacgattttccttctgaatgcttcattttcattcaacaaggtcaagtacataaagtacagatcaaagtgaattcttattggataaaaataatggcattattgatctgcaaattgtttcttttacaatattttactggtcatcgataaataattttgaaggtcattcatatttgtgtatttattttttacatgaatttgacgatgacagccaatctctccttcgattcagctgcatgatttcacaacatctgtagaaaaggttgatttctctttccttaattttataagtatccattatagattcttcaactgtccacctttcatctttgaggtggtcatttaaagatcattgtttctgttttagaatttccacagttattgcattagttgttataaatcaatatctagtaggtttctgaactcagctttttagagacatcatcatacatcacataacactcattcagtatataacatggtataaaataatatgagtatgcatagatttaagaactaaaataattcaagcatgataatagatgtgtgtgaagtgaatgaggatgtttgagcaaagaggtgaatctgtggaaccatttttgatgagagagccatgtttctaccgtttttctagcctgaagaagattcatataagattaaatgataggccgtagcatttctaaaataacctttggagactggcaagtctagtaagaccaagttttaccttcagtattattcctctaaccactagagggcaaaacatccacagatcacaccttgaatctcctcccatttaattaacttccaacagtaagctgaaaataataattattcatacttacccactataaatgtatctacttataagtgtgttatcctgcagacaactggttcaatcttatttcaggcaaccatataggaggaaattaaatggtaaatggctcagtgctgcgtattcatgtttcatgatcatgtgctctttataaacttgtttcaaaactactagatcttttcatggataaatactaatataacatttggaaaaagaaactacaagtacagtaaaataaaaatattatttcattcttaaagaaaattagcattattttgaatcagtgccaattatttcatagataacaatgtagtcaatgcccattaggggtaaaattatttgagatatatgatacaaaagccaatgagctcaagggttaatgggctgccatcaaggtagaccgaatggtgatacaaatgagacatggggaatagaaactgagactaaatatttactagaagactttcctacctttacatgcctattaaatatgaaattaagtaaatgcattgctcttcagtgggtagcaagacacagagccgtttccctttatagctcaaagattaaatttgtcacagtgatgtcaaacatccagagtgctttttaattatccagatagataatttttaaagaattaacatttgcctccatttcttcctaagtccatctacataggtgtagacagagtaaaaaccatttaatctatggatgtacattttgattgttcatattgttattatttgttgattagcattaggcaccactattctaatcatctcatgggagaaaatgtatcataaccaacttcagtatcatactctactttttcatacgaaaccatgtcgtcggtcgaacattataacttcaaggaagatttgatatatactctaacttcaacaaaatgaagctataatatgtttccttgaaatatgctatagtattacccaggaaggaatcaattttagaaaaaaataatattgctgattatgttgatattataattatgttaaaatgactacttctacatatgaatgacataataatgtcattcctcatatacatgcaatattctctattttataaaatcagaaggaataattattaaaaatctagttgttggttttttttttttctttttggtttctttcagcagcagttgtagaggtacggcctcctgagatgagggacacacatacatcaggatgcattattgtgtgtgctgtataatatgcacacaaaaatatgcactattgagtgtactctgcagtgaactgattctaagcagagactaagccacaacgtttattttaacaagctccctgtatcagtgaacacaaaatttactgtagttagtaccatctgttaaatttatctcttcataggacaattaagccattcttgtagttatttaagggttaaatatagaattggcttttatgaacatattctttgggataatttaaggtgaagttgggacttggggtttcctcattgtagccagactctggtctataaggagaaataaatactatgaggattattgaccatttgtaaatcagcatcatgacagaccagaaaagtaatttgcaggtttcttttccagccatagttcaaaagaggctaaagaaggaaaagaaagcaaagagaaaactgcaggaggcactagaatttgagacaaaacgccgtgagcaagcggagcagacactgaaacaggcagcttcagcggacagtctccgggtcttaaatggtgagaacatgcatttttttttgaatacgcaactttgctttgcattagaggaaggacaatgttgacatgtgcttgtgagtgtgtatatgtctaggtctcatgcgctatttgataggtgatttgatcattgtgtgatttgatctcattatctgggacttggcattgcttttctgcttctcaaaattcatttctacagaaaaaggatgcaagattaatccaagaacccctacttcagtctatcatatgtccaattttactttatctatctacaccttccgaaaattcttataattaccattctgttaaatcttgaaaagaggagacttacgtggttttaattctgtatcaagtgaacaggtagctcttgtttttaaaagacaataggaatcaaatgaaatctatgtcctttcttaactctttgtgcttttagactccctgacccctgagatagaagctgaccgcagcggagggagagcagatgctgaaaggacaatacaaggtaggaatttgcagaggctataaatctagatctggctatatgagtttttcctctgctttaggccgctattcaagcatgtagcctaccatctgggccacatcaaaacaagttcaaacaaggtcaagttcatcttgcttgtttataggactgaattcattttgtgctgatagattttctttaaattaacaggtcatttctgtttatataatgcaattaaaagggaataattaattttaaacattgtatgatttaatattggacacagtgaatgtgttttattgagtgttcgaagcacaatctaattctggcaggctgtaaaattccattcaacataaagtcatgtgctatacaaatagttttaaaatgtaaaggtgtctactcatttgtgtgacagccacagcaggatacatataaaatatattcactaaatgctaagaataagaattattgtttaggtcgtatgtggattttcatatgttctgtatattataatatacatttaataatgaaggtatgctgagcaagatcaaatataggatagtaaggaggttgtgttaaacagctagaaagctagatatggtatattgtggagcctctgggattgagcaagaatgaaatcagaaggcagcgtttactttccaacacccattctagacaaatccacttacaacatgaatatggaaacagggggaaaaagaacatttgttttctattccaagtaaagacgattcttcaaggggaactctaaaatgattgatggccacaatcttccacgacgcttttgttttacattttaagctcaatcatttttagggcatcatttgatactaattgtgtgtctcagtcagcaagaaaagtgtcagccttggtttagtgtaaaagtagcacacttgttttgtatcacatgacccagtaaataaccatccaaaaattgaagaaatatccctgcggatataatgctatatatgaaaccaatatttatctgttcttatgtcataatgattagttttaattaacaaaacttgaataatatgctattaggaaatattttattgagtagaagattaatgaagttctagatacaaaaactatctcctttttaacagaatgatgcatttcactgcacttatgcacatcttttggatcatatgaaagaatatgctttctaagaaaagttactcttcccagcaagccaattctcattctgaggaatgagaccctccgtacaggtggaggtaacacctgttctggtgtgtttacacaagggattatgcatacactaattcagctcatatgaaatactctagtaaacctcagacaatccagtgtggtataatatttatgtaatcttccaatgaacataggaaaaagctataaggatcacacatctctatatgttcattgtcattcattgttaggattgatgaagcaacaggtttttttcccccccattgttttttctttttttttgcacttgggtgaggtgccacaagcctgtgatttctagaacttttagaaattaaagcagaggaatttcaagtggaaaaccatcctgggctatttagtgaaattatttcgcaaaaaaactgaaatcacaccaaatatgttgcttatatattccagaatatatctggcatagtgcacaggcaatagaatttgggtaattaatgaaattgttcctattttcattttaaattctaaagttcacatatttctaaacatgcattttaatataagtaaagtcttgctatgtaaggatgaatattgaaaatgcaaaatttgtgttgctgtgatttacgtactctgaaaaaaatgattttattttctttcttttactttcaagaattaaatcaactgaataaagtagtaaacatacccaaattgcttcagtatttgatgatgatgatttattagttgttccatttccttacatctcaaatgatatccctcttctgggtcacctctccacagccctcaatctcacattcgccctctctcccctcccctttgcctctatgagggtgctcccccacccaccaccctctcctgcccctccagcattatcgtatgctgggacatcaaacctccacaggaccaagggcctcccattgatgtcagacaaggccatcctccctttatatgtatctagagacaagaatccttccctgtaccttggttggtggtctagtccccggaagctctgtatggtccaaccagcctacattgtttttctttctttctttctttctttctttctttctttctttctttctttctttctttctttctttctttctttctttctttctttctttctttctttctttctttctttctttctttctttctttctttctttttctttctctctctctttcttttccttccttccttcttcccctccctccctccctccctctctctctctctctctctctctctctctctctcttctttcttctttctttctttctttctttctttctttctttctttctttctttctttcttttttggtttttggttttgtttgttttggttttggttttggtttttttgagccctgactattctggaactcactttatagaccaggctggtctcaaactcagaaatccacctgcttctgcctccagagtgctgggattaaaggtgtgcaccaccaggccaggctacattgtttttcttatggggttgcaattcccctctgctctgccagctcccacaccagggtccctaagctcagtaggctggttggaaccaaacatctgcatctgcattggtcaggaggtggcagaacttcacaggaaacagccataccaggttcctgtcagcaagctcctcttggtaacagcaacagtgcagaggtttagtgtctgcagacaggatggatccccaggtagggctgtctgcagatggcccttccttcagtctccactccatgtaattcctttggacaggaacatttctgggttaaaagttttgagatgggcgggtggtcctatccctcgaatggaggccatgactgtctactggaggtgatctctatagggcctatctccctttctctgtgtgtttcggctaaagtcatctgcactgggtccttccctggcgtctgggaccctccagtggctgcctccagttcctcatcccccactgctacatatttttattcgatttcctgaccctctgtacctttctcctgtcccctccagtacctgatcctgcccccgtcccgtttttcctccccctcctctctcctttccaggtcctccctccnnnnnnnnnnnnnnnnnnnnnnnnnnnnnnnnnnnnnnnnnnnnnnnnnnnnnnnnnnnnnnnnnnnnnnnnnnnnnnnnnnnnnnnnnnnnnnnnnnnnnnnnnnnnnnnnnnnnnnnnnnnnnnnnnnnnnnnnnnnnnnnnnnnnnnnnnnnnnnnnnnnnnnnnnnnnnnnnnnnnnnnnnnnnnnnnnnnnnnnnnnnnnnnnnnnnnnnnnnnnnnnnnnnnnnnnnnnnnnnnnnnnnnnnnnnnnnnnnnnnnnnnnnnnnnnnnnnnnnnnnnnnnnnnnnnnnnnnnnnnnnnnnnnnnnnnnnnnnnnnnnnnnnnnnnnnnnnnnnnnnnnnnnnnnnnnnnnnnnnnnnnnnnnnnnnnnnnnnnnnnnnnnnnnnnnnnnnnnnnnnnnnnnnnnnnnnnnnnnnnnnnnnnnnnnnnnnnnnnnnnnnnnnnnnnnnnnnnnnnnnnnnnnnnnnnnnnnnnnnnnnnnnnnnnnnnnnnnnnnnttttgatttttttgttgttgtttttaacatcaagattaccttaacacatttataatgtacaacagaagaaaaataactgtgagctgcatgaaacaaagaaagttgagtagataaaaaggcgattaagaacgagtccaaactcatttctcatttatgaaccagtctctgtcacgtgtttttgcgatctgtggggtaccaacttgttcacaggttaataataataataataataatgatgatgatgatgatgatgatgatgatgatcatgatgaaatataaaacaaacaaacaaaaacaaaacacaaaccaaccaaccaaacaaacaaacccaaacttccttgcctcactatgtcatccagagtccccacgcccagctgtggtgctaggctcagctgccttcttattcccagtccaaccatagcagaaatcattctctattctgaaatgactcatctgaattggtaaacaacacaaaacataaataacccacaatttttatactcgtcatgtatttttaagattttagccatcaataatgccacccttggcattggagtgagtcatctagatcttggatacttaaggaccactcaaatgcaagatgattactgtcatagtagcacctaggctagacgagacagcatctcatgggcattttgtatcaccatttccataaaagcaaaaatatgagaaagaagaaaacagaatggtgtaagaaataatcctgaagaataaaatcattaattgtttaatggttaatcattttcttgaatcatgaggtaaatctgtttatagtgcacagggaaaaattctgcactgctgatatggcaaataagtaattcaaaattcatgagtttggttgagattctaaatgcacagtgaatatccaaatatttaacagcaatttgtttcagggtctgatttacattgcaattaggtcttccatgctgtgacttttaacaaccacccatattttaatttctgctggagtttaaaaagcatactctactatatgttttataagatcattttataagatcatttatatacagaattcatacacatattcagtttttatatggtttacgtgtagtcaaaaactatggtcccaaacttcactctactatcactttcaaatatatgtatgctgtatatatacaaacatgatagttttattagtgtaaatcctctgcacatggtattctctctcactaggcaataacacccatttttaaaaatatttttctttctaatttcttttttaattttatttaattatttttatagtccagattttatcccttcccagtccaccctctgactgttccatatcctgtaccaccttgccaccccccagtctcttcaaggatatctccatccactctaaccctctattccaccagaatgctccactccctagggcctccagtctcctgggttaggtacaacttctccttctgagtccagacctggcagttgtctgctgtatatgtggtggggaactcatatcagctggtatatgctttctggttggtggcacagtgtctgaaagatcttgggtccaggttaattgagactgctgctcttcttcctatagggttgccttcctcctcagcttcttccatcctttccctaattcaactacaggggccaccagcttcttcccattggttgggtgtagatatctgcatctgactctttcaggtgctcattgggtcttttggagggcagtcatgataggtccttttttgtgagtgcaccatagcctcagtaaaagtgtcaggccttggagtctccttgaggtggatcccactttggacctgttgcttgaccttttccttagtctcctccccatatgcatccctgcaggtctttcagacaggaacaattatgggttatagttttgactgtgggatggcaacccaatcccgcacttgattccctctctttctgctggaggtgggctctagaatttccctctccctactgttgcacatttcatctaaggtccctccctttgagtcctgagagtctctcacctcccaggtctctggtatattctggagcgttcccctacctccatcttgtcaggttgcctgtttctattctttctgctggccctcagggcttctgtcctattttccccacccaatacctgatcatgtttccctcttcccttccctgttccctttcccacccaggtttctgtccctccctccctccctcccttnnnnnnnnnnnnnnnnnnnncttccctccctccctccttccctccctccctcccttgtcccctcgtcctctctctctctctctctctctctctctctcaatagatatagatatagatatagatatagatatagatatagatagagatagagatagagatagagatagagatagagatagagatagagatagagatagagatagagatagagatagagatagagatagagatagagagagagagagatagagatagagatagagatagagatagagatagagatagagatagagatagagatagagatagagatagagatagagatatatacacacatacatataaatcataggatctttcaaacatacatagacatgtttagctgcatcagattataatatatgattgtctattttcttgcctcagaaggatctcaaagttcagtacacacacctggcttgccactgtaccttgacctggtctaaatccttactacacaatgagaaaggattgaagctgaccttccttcctcttcattctaatgctcagtcctctttatgttgctaaagtattagaattagtatttttcttttcctaatcaccatcctggtgttttccctcgctcaagggacagtttagaccctttgtggcagacttatctatcctcacagtcttgatttagaagttactgtgttcaagagtacgtccctgtccttccctctctctgcccctagagttcctactggctgctcagaacaagttctgttagtgctgggagctttgtgttcctcctcaggaccaagctgtacactgccagctctgcactgttcaatttccttcagctggagttggagccgaacctttaccatccagtttggtcctgattgtggccttgctgtctggtggaatgttggccatgtagtaagacatactgcctatcctcggaagaaatagatcaagctttggtagtcagataccaaaatgttttcactttgatgggtgaattaacagtttgatttgtttttgtacttattctctgtatttgacctgagatttggattatgtattttttatttttatattcttatatttaatattctattttaaatttatattttgctatcttacaatcacacttacaaagaaatttaatttaatttgcatacattaatttcacccttcttttacttttacttaaaaataattaaacattgagcactatatcatttataaactctaacattatttggtataatcatgtatctaacatttcacatatatatgcagaaattttctaaaatgttttaaaacttttacttcccttatagaatttattttcattttttatgtaatatcttggttttttaaattttgtttttttaaatcaatgcaaatatgagctgtagttcatctgacatcatactctgtctgcaagttgtgcttacaaaatcttgactccacttgaaagtacatctcttttatttacatccaatagccataatcaaaactacttggctttttattctctttttgactgatctcagatcatagaaaaccaaatactattccaatgaaaacacataaaaggcttgcttccacattcacaatcttttttatttaaaaatatcttctttctgctttctagatatttgaagatgcatgccgactttttaaattattcatctattcaacaaatccattttagcattgatgtaatgccaagtacactatcatgttattgccttagtattgggaaaggagtttatgatagaatgaaactctttgttggacaaagttggaaactgagtcttaatgaaggagaatggcttattaatggttgtagcaagagtttgtcagtcagaactgcaatgggttctagttgtttgatatatcactgtatttttttccctgagtgcttatagattgtgcttgttaaatgatttccttcttctcttttaagttggagaattgccatttggctactagttttcagccaccctgtatcatgatgcaaacgctgcatagatgtgtgtgtctgtgtatgtgcatgtgtgtgtttgtacgtgtgtatgtgttatgtgtgcaatatgtgtgtgtgtgtgtgtgtgtgtgtgtgtgtgtgtgtgtggtgtgtgtgtgtgtgtgtgtgtatgtgtgtgtgtgtggtgtgtgtgtgtgtgtgtgtgtgtgtgtgtgtgtgtgtgtgttatgtgtgatatgtgtgttttgatccaggttcatactggcataggctgattcaaatgttcaggttttcaacctcaacttgctgtgtggtgggagtacaggcttgtttaccatgtttatcttgaacttacatactttattaagctttttattgctttaaatgttctagcatgcaaatatcctactaacacagttttcttcatttagaatttgtgatagtatacatttagtaagtatgtatacattagtaattgagtggatttacaatgtgctagtcagatcttctagtgagtacatattttagagaaacaattataggtagaaaatgttacttctggctcagagttccagaggtatcaggctactacagtggaggatgcaacacagaacagagatgctatcagaatggaacccaaggagcataaagaaagaattcctacctgctcagctttctcttttcccctcattttcaatttatccagacacccatcagttgtaggattagcgtcaacaaccttcagggtggatcctctcttcagctattccttgttggaaacagctttgcagattcactctgaggtccacactatcattcttcctggcacatttcaatgtaatcaagccaacaattaagattaggcaatgggattgaaatggatacttacggagccatttctcctgtcttatataacattctaattaaaagaaaaaagtaaaggcaaagatcagaggggctagttaattccttgattatcagtctaccagttggttgtattgcttggaatttacattgattgggaattgagatttacaagtccaaagaagggtctccctgacataaattgcaacctggacttccatagctctgtttcaggatactacttagagccataccactcatttccagtatccagaaggttgtgagtaaattgaatttgtcactagtaacatccaaaattattactactaaagaacgagttccagtgcacagcaacaatccctgttttgctttttactcttttattagatattactcatatattatgcttataatcccacactggaaaaatctcactctaaatggataaagtagaaaaaataagaaataaactatacttatataaaagattcaacttcatccccaaatcttagcatgtaatggatttttcataatcataaatcatcattaatacatgcattgtcttcatagtatattgtcttggctaatagtttgtcaaattaatacaagctacagtcatttctgaacaaatacactcaattgaggaaaatgccttcataagacttgtatataggcaagtttgccaagtattttcctcattaataattgatgtgggagggcctatctcactgtgggtagagccaaccctgggcccttggtcatgtgttgtataagaaagaaggctatgtaatccctgcaaagcaagccagtaggtttatcttcttccatggcttctgcctcacttcttacttccgggttcctgcttttacttttttcaatagattatgacccagattgtaaaaaccaagttactgttggggatgttttatcatagcgatagaaaggcaaacacgcaagtctttgatttctcatgggaggtgtgtttgaatagatagttaaaaggcaaacccagacttgaactttaacagtgcctaacggaagctcccttaaactttaaacatcttcgtgactttttaaagtctaacttgattgccatacactcgctacctgaaaatctcctttcctgtacttgaaaacaaacctctaagtttcccacgggagggagaattaggaacacatctctacagacctaacagcttccaaacaccaggacttctcctcgacttcaggatctctttttactacctttcatcatttaacaaaattcaatttcagaaggttaatacaaatattaatccatacaaaacacctagcatctactaggtgacaatatccatacagctgtattttaccattaatattaaatttcactataataaaagaacttatttaattatttacaagttgtcaacttgtaagccctgaaattgttacttttataatatataatttaaatattcatttttggaaagctggttcttatttagtacatgtactggctagttctgtgtcaacttgacacagctggagttatcacagagaaaggagcttcagatgaggaaatgcctccatgaatacaactgtaaggcattttctcaattagtgatcaagggggaaaggccatctttgggcggtagtcttggttctataaaagagcaggctgagcaagccagtaaagaacatccctccatggcctctgcatcagctcctgcttcctgacctgcttgagttccagtcctgactttcttggtgatgaacagcagtatggaagtataagctgaataaaccctttcctccccaacttgcttcttggtcatgatgtttgtacagaaatagaaaccctgactaagacagtatataatttgtaattcatcctatagaagactgcttatagagagtttaaagaaaataatttatctacccgaaccaaattttacacgtgtttaaaaaaaaaaaaaaacaagaatagatattgtaaaatcaaaaccaaccaacagaaatagcagccaaggatttatacctaaccctcgacagctcttatttgatgaatgactcctattgacccacttggacttaaaggatcagcctgaaaatgacctcaaccactgcagtcttttaaggatgtaagttttagaaatgtattactcgagcaaaacaaagcaataacaaatttgcttttagtcctttagtactgacttggagcacttagtattgtttcaatacatttagtcagtttaaggtggcattgtttatgttaaacaaacggtgatcgtcatccaaggccgtaacgaataaacagtttacagttccatacttgtgaactattgttaacttcaaatagtttcaggggaacacatgtatttcataaagtattatattaaggtatatttataatttcagtacatgctttgttatgttttgaaaattacatttttaaagtacattttttgtgaatatccataaaatccaagtgcagaaatcctcttctagatctttgttcagaataccttcttttacttaaaatgattatgcagaaaattaatcttaggaaacattaactattaaaggcctaaaatactgtcatatcatatctattattattattattatataaaataatttccttatctttgttgtcatactgcacactagtaatgtattggatatcatcatttttttcttgcaaaaatactataatgaagaattggtactatgtgagttttggagatgtagcaattatatatcacatatatctaaagagttcagggttaacttgacttaaaagttagagaggaagatggacattgtgcaggtaaatttttatcagtattgaaacagcattcttaatgcagaactaataatatgtaaataattgaagttaactggctcatttgtaaatgtgtttatgatagggttttatgctatgtgaagaacgaaagaaaaagagataagcggaaactgggaatgatatgaatagtggaccttaaagatcaatgcaatgctgtatctttgatttagtgtcataattactgaagtgaaagagtgattaagcaaaccataccaataaaattcacagttgatcataatgtacaaagcgtagcatgcatctgtttcaacagcattgaataaaaggggggtgtttacaaatttgagggtgagtgaaataaaatcacctttgtgaaaagttcacaaactgcttttagcaaacactaagaaggttaatattgaatcataacatatgtgcacatatcatagtctccagagcatcttagtgttgctgaaaccatgcacggcaaacaatgcatccaaaaaaacgtatttaaataagtctctggtattataatgattaatatataacttcattaatatataagttcactacgttaattttggaagaattttatctttgtattgatgagaaacttacttaaatgtttgtgcttagaatttcaaaattctattatcacgagaaaaaattgatgagatttataaccaactctttagttattgaagatgatgatgtaaaagataaagataactcatatcagtgaatttataccctacactcagcatcactacatccacagcctttctcctccttcactgttgcctggacatataagggaagtttaataaacagaataacttctttataatgaaacataaatacacattttaaaactgtttattatatttgagtgtcataaatgtgatctgtaaatagggattcttgtctttgttcatttaaatacggaataaccatgaacaaaatttaaaaattgatacaaacaaatggatgtggaaagtccattatcaactttagtagcatatgtcgtttagacattcgagacatataacaccctttgatacagacactcacttaggaaaaaattaaaacatcatcatttacaccataaatataaaaagcttatggtgccttattccacctcccgtggtcagggacagaatgcagacatgccacaataatgttttttttatttctactgttcgaaccatattaatgagaacatcattttggagaactaattatttctatttgtcttgtgtcacactttctaattcccctatattagcacagccaaagcaaattaattgcttttccagcagttgaaccttgtccaagaatgagctcacattcccttccagtttccctgtttgtgggagtgcattgtgtcaaaaatttctcttgatactaaacatagtctcaagaatacctttacagatttctgtgtgctcacttgatggaatttataagtttaagtgacccgccaggaaagataaagttcttagccacgagattatacatcaaaacagttaaagtgaaattaaaattaaatgaatgaatctcactgaagcaaaaaaagcagtaattaatggttcccttaattgtcttcataaaatatttgcatgggtctaatttgcataatttgcatgtattaattaatctttcaaaggaattttgtgctgagagaagccaaaaaatctctttgttttatttaagatctaatgaaatatttatcttctttaatgaacttctcatcttcattaaaataaaaattgcacaagtttgtatgttttaaatgtttttataattgaagtattcaaaaaatctctttggacttagaacagctgaaaaacaaacacattatttagcattcagtatcactacaacagtacttacactttaaaaaagaaagttcaatcacgctttctagaagggtgcagagcatttgggaaatgaaaagtgcttttttctttttttttttcatttgaaaaactgaaaattataaagcctgattatttctttcaatggctatgttatttttatggctgagatagcaggcaacaagggtccagataaggaaaaaatatcagtatgttcaattgttcaggataaagtttactggctaaaaatattttagctagttcaaagaaacaagtctattaaaattcacttttatatctgtaatgagcgcgaagccaacagtatttcctggcagaacctgctcagcttcggctctgttctaaatctgtctactgaataatggcagcaggggtttctgctctcacaaactgagggatcatagcgaaaaccaagagacgtgccttggaaggcttggaatccagaatctctctctggtgccaaatcatatatattcatgggaaccgagaggacgtgaggagggagcacggaagctaacaagacataaggctagaggaaagacggtctgtccacggcgttcattctttatggtgcagccctatctcacaggttagaaagaggttcattcctaacagagctgaaggtatgtcaagcgttttccatttttcctttttgttattgttttttttttaatctctatggaaagctcctttgatatttgaagaaactgaggcacatgaatgtatatcaggagctcaacactaaactcaaaatccgagatccgtttgtttttatgtgccttgctttctgtacgacggccttctttttatatgatcataatttacgaagtgcctctgagtagctacatgtagcccagataataatggtggcataaatttataagtattaacattcaaattgcaaatatataattcttttcatgtaaagtttagtaatgtgataaaatcaattaagctgactttggcgctcccatgacactcggtcctaatttacattttctcaagaatgttttctaaaacaaaacaaggcttagttttctttatagtaaagaaaaatccaatcatttgtatagggatgattaataaatcagttataaaataaattccaataccgaatttatttgacactaacatggtttattaagctgaatacgaaagaattaaaaatgttatcattcagtttagtgccaggaaagtcgcagtgaacttttaggaaactctagtgtcattcacattgtgactttgggatttcactttaactcctctgctgatattcttacaccatcaagatgtcaacgcatctattcagtttttctgagtgtaagccccggtgtgatgtgcacatagtctgcatacacacatccgtagggactttaaatccagaactcctggattcacattcccatgtttctgttcattcgtggcataatgctgactgtgcaagtagatcgttttagctcttcagatcctccatccctaaatctaagaagataggtatatgtacccctttatggctcgaccagctcttcagctgacaaattaacataaacagagaacaggaaagtggctggtaaaagccatgtggaaactactgttggctgttattacaactagatgcaattttaatgtgatagtattttcaatcctatttcttcttgaaaaaaattacacgtatctcagaaaggttaattcttaaaagaaaattttctcgccaatcacagcattttcctctgcacatcactcagacttttgtttaagacactgtttaagctggcagatggaaatggtacacaccagactttccagggcacttaaaactttcaccacagagtgtgacactttcactctgtcaacttaaaaatatatagcttaaaaagatgaatttgtggccacaaattatgtgtgaatgcttataagttaagtaaaagataaactacacttttactcaaatttaagatggaaatggtagagcgtctttaattttttaattatattttggcaaatctctgttaatatgatttgtattatcatacagtgtggcgtaactgcacactcttctaattcatatctaatcacactcctgaggtagtacatctccaaacagagttccacttacgcttactaattatacctataaagcgatgaatgatggctacaaattattggatctgactctcattctttatttatttctccctaggagaaagagcagtagatggggagatttcagtccataaattattcccatatgtattcaggtgtactgtgtctaactgtgattccacactatggttctacacttaattctgacgcccatgaagtcatggtggtagaactaagaggtagatgtttgctcctcatcataaaatattagcttgtattaataatgataatgtcttcatttttaatggtgtgcgatggttaatacagttttagacctatctgaatgtgagttatagtcatgactggctttatataaataagtagctccaccaaagctttatacacttgcccagtctaggcctgcttaccccgtgttgttagtaataaaatgagtttcataggtgagtagaaatcagggacaacctgagatggcagcacatagctcttctaaactaacagaggacaggtcacatgtgagttttgcctcctaggtgttactgtcagcccaacagtggcatatattttctaagggaactcagaaatacaaattcctttaaaatgttgcattgtaggatcctgtacaagatgtgagttagtgtattctatgaaaattgtaaaaaaaaaaaaaaaaaaaaaactacaaccaagaagccttatatattggctatctagcatcacacgcaggcaaatcaaaacccagcatttgtcttacaagcagagagaaactgacaaatactttttggttgaatgcaatatttttggctgttagtaacctctgaatgcaggcatacttgagatgatattttaaagcccactctcctacatcatcctttatgtgtatgtaattcagattattgttatgtaagacacttaatatgtgaatgtttcaaagaatagaaatgtgtacgtgttcactgtagggtgcaggaagtaaaggcacttgtcacctgtgatggtgcctgatgatcttgttggatccatgagatccacatgatagaagacaaaaatcaacttctgcctacttattctccttcagggatacatctgcacacaagcacacacacatacagtcacacacacatatacagtctcacacacacacaagcacaaacacttccctcccagatatacctacatacctctctctctttctctctctctttctctgtctctctttctctgtctctctttctctgtctctctttctctgtctctctctgtgtgtctctctctctctctccttctcatacacacacacacacacatgcacaggtacaggcacatgcacacacactagcacacccctacctatcccccaatacacatattcatatccacaaataaaggaatatgatatgattttaaacaaaaaacattcctaaatattcaaaattagcagaattaaaagaagttatatgcaatagtttaaagaatttactacttttatacaatgatttaaagtcttatttctctccaagaattcatgataaattatcaatgtgccaatgcgtttttccttttattattaggcagttgtttttaacttttaaagatctttggtttctttttggatgaaataattgtggttaagtatacacataagttctactctacttatttctattgttggctgtatttgtgattttggaatacaatgatttagtaatgtgattgatacataaatacatagtgccataatttctctactttatgcttactttaatttttaaagactttttaaatgtgacaacagatggtaaattaatagaaattagggagtacacttactgaatacaaaactcattcaggtaaagggtaggaaaagtaagtcagcctgatagtggtggctaagacatccaggccccactgtgatgagacaggtctccaggcagcacattaccatctcaaccctcagtctgtatattagtcagtgccagcacatgaccaataacagtggtctctgaaattctaatgctcagcaatgacatcaagggatatatctgtaacttgtttactattcaaaattcagtcaagactcttaaaacattctttgcaaactataaagagctgtgcaggcttattcctggtcagtgagatttcaccaagcccaggagaaagaagactagactgtgtaactgtcaactgtaacttacagactatcataaagagaagagacatatgagcttgattctaactttttatagctaaactgttcatgattccatgtatctctgttttgtgtcattatatgatttttttttgaaaacacatggaatgagtaaatcagtctagtcaacaggtgtgtgaacaattggaatttaatgttaatcctttggaaatgttctgttgccagacatagttacctcaacatataacacaaatgcacagttcttatgtgagactttagtgcttttgaccatgaaattcttctcatttctcttagtaacttgagactctccattccttttccatgggtcatctcttttttatattccacataagttaagaagactcgtaatcaactatggactctgtttgtatgtgtacataatgttagatgggtagggaagtgaggagtacctgagagaacttggggaggggaaagaatatgagcaaaatgcattgtatgtaggttttaaataaagtaatttatataagaagaaaaaccatgcaattattctgcatatgagttatttatcttggaacaatatgtatttatccatgtgtcttggggtttgtattcctgcacaaaacaacatgaccaagagcaaattggggaggaaagggtttattcagcttacacttcacattgctgtacatcacaaatggaagtcaggacaggaacttgcacagggttggaacttggaagcaggagctggggcagaggccatgaaggctgctgcttactggcttgcctctcctggcatgctcagcttgcttgctctctctctctctctctctctctctctctctctctctctctctctctctctctctctctctttctttctttctttctattagacattttctttatttacatttcaaatgctatcctgaaagttccctatagtctcccctctgccctgcttccctacccacccactcctacttcttggccctggtgttcccctgtactggggcatataaagtttgcaaaacctaggggcctctcttaccaatgatggctgactaggccatcttctgtgcatatgcaactagagacacgagctctgggggtactggttagaacccaggactaccagcccagggatggcaccactcacaaagggttgggtcctttccctttgatcactaattgagaaaaaggccttacagctgtatctcatggaggcatttcttcaagggagacctctttttttatggtaactccagcttgtatcatgttgacacacaaaaccagcccacatgacatatttttgcacagacccagatttttttccttattaactcatctcctggtggatacaagttaattttaggattgtcagtaatgctacaatgaatataggtgcaaagacactattttgattaactgatttcagaccttttgtactaatagtcccaggtgtcaatgttggtgcttattataactgtctttaggtttatgaggaaccttcctaaacctttttcatatagctgcactaatgtaaagtcccatcaaagctaaaaagcaaaacaaaacaaaacaaaacaaccaaaaaagaacacaaaacctttaccgttcaatatatcatagaaactattcattatattttgttttattttatgtatttaatattttatttatttgcatatcaaatattgccctcctccccatctccctcatagagttctttcccctagtcccccctacccttctcccctgagagcacaccccctccctggcatccttcttccttagggcatcacatctctacaggattaggcttaccctctttcactgaggccagaaaaggcagccctctcctacatatgtactgggggccttagaccagcctgtggatgctctttggttggtggctctgtctctggaagttcccataggtccaggatagttgaccctgcggggcttcctacagggatgctatccccttcagttcctttgatcctttccctaactcttctatagggctccctgacctccattcaatgattggctgttgaatatctacatctgtctcagtcagctgctggtagagccgctcagagcacagccatggtaggctcctgtctgcacgcataacatagcatcaataatagtgttaggaattggtgactgcctattgggatggatccaaagtcagccattccttcattctctgctccattttttgttcccatatggttttttatttttatttttattttttatttattttttttatgtaggagcaattttgggttgaaagctttgtaagtcctttgatgtcctcatccctcaaatgggggtcctctctaagtagacttggatggtctcaaagtcttccagatctgcctactactctgcttctggggtgttggaattaaaagtgtgtgttcagaattacaattttatttatttttattttttgttttatttttaatttattttttacattccatattccattccccaccccaaccccatccactctctgactgctctacactccacacttcctccccaccccactccaccccattgatgcccccaacccccaccctacctgacctctaaactccctggatttacaatttttaaattgttttatctgttgttgttgctgctactgcttcttctctttattttttcactgttggatctcccaatttttgatctctcaatatttttggatatgaacctctatggctatgtatgcatcatgaatatattctcccatacttcccttgtactgtggaagtcttttcctctgatggcatccagtttgtttatttatgttttcttgccccccccctttagtgttcaattgagaaagatcttgttcgtgtttatttctctagctactttcctaattttgttgatattattattgttttgtagtctctggtttttctgtttaaagctctcatataattttaaggtttattttgaatgggaaaggagataaagcccaaatatctttcttgaaatgaagctttttgagcacaatgggttgtggaaaactactccatttatgtttcttgtacctattttgaaacatcaattgatatgcttcagtttacttgtggactctcttgttgcttccatgtagtgtgtgctctttaccttttattcttttgttattgttgtgtgacaaaaatcacactacttgaagttaccactgctgagttgtagagtttcacattcatcagtatgaaccaggatcatttgctcagaaccaggatcatttgctcagaattggtttagcttttcattgtttttcattattcaataggtattctagattttaaattcaattttactttataatgtggtttgtgtgcactgttctactactacctagaagtctacatatatccatatccacatgattaagccaattatacacaaattagaagcgcatctcataaatggaagctctaaatactctaaaattacagttcttaaaacataatgaaaagagagagtcagtgttctcacctctcctggagacatgtttgcatgtggcctgcatccctagggctcctgcaaacactgcagctaggaaaaatgcaaaaaagcagatgaacttgttccttctcagcatgggcccacagcagccattgtagtcctctagagtctttagaaggttttaaacattcctgctcagaaaaagtgtcatatttatcttatgcacatcctcttgatttttcatagtttgtgcttaaaattttaattacagtaaaaaatgctccaataaaagcaagccataactcacacaaagaacttaggcaaacatcactaattctttgttgagttcaatttacttcataaaatttatatacatctaacattaggagtctaaaaacccataaaatatacaatatttttctaaaatatacaaacattaataattctactaaaattgatactagttaaagtttattaactcagctgtaaatctcaagatatttttaggagttccatgaaaattaagtaatatattatttaaataaatacacaagttatgttattagattttatcaaaatatttgtggataacttaatattatcaaactatgtctgtatcatgtgttatatttacatttaaaagctactatactacataaagcatgtacatattcatattttgctttttctgatagaactcattttcggctttcttggttatgtgaactcacttgtatactcttgccagcaatatctgaaacctaaaatttatagagaaaatttagaagtttttatttttgaaagatgatccattgtagaattttcttcttaaagaatgaatcctttgagccatgcttctgaatagatgtcatgcattcagaacacaaacgaggtgagtcactttgcagatgggattggccgtcacataagatccgcaagtccatgtatgagaagtgggcagtactactcatataatggtttttgagaagaccacctagatgaatattatgctgtgttctcattagggttactattgctatgatgaaatagcacgaaccaaaggaagttggggaggaaaggatttgttttgtttatacttcctcatcattgatcatcctccaaggaagtcataacaggaacttcagtaggacaggaatctggtgagctgctgcaggggcggcgaaggggtactacttactggcttactccttatagtttgcccaccctgctttcttatagaacccaggaccatgaggtgaagactggtaccggcaacaattgtcaggtcttatgaaggcattttctccattaaggatttctactctgagataactgtaacttacgtcaagtagacataaaaactagctagcacatgattgcctctaagagtgctattggatggtttctaaaatatttatcaaagtaaaattctagtccctctgtttttcttaaacctaaaacagtatgttaaatcctaagtaatactgtatagcagattaaaggtaaagaaatgaaaattgtaattaattcaacaaaaagtaatgaacaaacagggaatacacatttgaaattcagttagaaactcatattatagggcttagtacatggaaagcaaaagcagtgtttagtagtttggcctttgtagattgggaaagtgacataagctagagtggggaatgagcattgttaggttaacaccatataacaggaatatgcagactgagttgtccaggaagcatctaggaatagtatggagctggagtttgattgtgtgatccagagaagaagcaggactttggcatcactgaagctaggactcttttccttgtaaacagattctttctgccaaatctggatgatttaagccgatccctaaaccaccattccatcaaagaaaaggccagtagtaagggaatcttagagtactatttaaatcactaagaagtcatacatttcgcaacacttcacaccagtcttgcttgtaacaaatggtttaaccagtttgaaaatatggtacaaaatgttttgtcatggcactttaagaagggtagaataaattttccccatgaaagtgaagataataaaggcaagaccagaatttttacactgttagtttatgtatataaaagtagaatattagatgataaaaatacatagtcatatgttagataattcatatttgacttatttattttgcaagtgttgattctgcagacttgagctatgacaaactgtcaattcaactcttgcattaagagacatgtatttttcatgatattgtttatatggcaatttcttggaatatcagtcctttcaagtaatccaagtgcattgaatagcgtcataaacaaagacagcaataatttattcttacgctaagcttttccatctgatgcatagatactctttgtgatatttgaacagagtaatgcatttttacttagatgaaaagaaagtaaaaattatactcattctttcaacttggtaagagaaataacattcccataatgttgttctgaaatatcaaaacaaattgtacatttttccaaaagaggcagtgttatgctgtgtttagccatcttagtatacaaagcaatgactaacagactcaacaattgtcaattatggctatgtcacattgttagttttcaaatgagcccttaactaggttaaaaaaaaagtgaaaactagacctgtaaacagtaaactattcatgagaaaatttgcaaaacagtaatatagtccgggaaaagtttgaaaaaatctgacaagatttatcaaagagttgcatcttaatattttgataactatataaatattttattgaaatggagaaacagatctgtcccattaaaatataggtttgctattgaagaattttaatgtaaaatgttcatttttatgaaatatcttggtaaaagtctgcatgcaattgcaatgatctctgaaagattgtgatagtgtctatgggaggagaataaaaattcatttaagagtagttttggcgtaatgcgaatggtttccttcagttcatagccctcctcttccctcaccttcactcaaggtgcacccatcagctcagtgtcatgagttaatttcatgcacatcacgattagtagtgatgggaaaaggaggcagtatcaagagtatcctcaaacacaagttgtaaattttaatggaagtgggggcctatgctattgtgacccagcgcagaatttcagagcaggcatgaagtaaacatatatcagcatttatcttcttactaaatatatgtacatgcattatcagaagctttgaatgtttcactgtgaacttctctattgcttaagactataaaaatatttagcagtctagtggtatttaataagtactgaaaacaaactggaacttacttagattaaaagtctaaagttctctgatgtttcctgaatttcttcattcctagagacagacccaatatgtaaaatgctgaatcgtccattagcaatgcatatttctgtgatagtacttttgtactttttttccattgctctctactctaggaagcatttagtgtcttacatttgttattatttatagccagtttgtttatattttcatgatttatttgtaaaacatgtagtctattccattagatagaacacactatgataaatattttaaaattgcaagacaccagacttcaccagactcaatcctagctatctgccctgaattcagccttttgagagacagttaatagtctgtcctgtttcttattcaatctggtatgctttaaatgttttaatggacatcttttctgctttttttttccttgattattcactattcactagcacttgtagtttgcatacacttaattgatgtcagcactgtctcttgatgtaaggctagattttaaagaagcattgtgaatttaaattcactcatggctataaaccacttgatagcaaaaatatttttgttttacatggggacttacttatttttctcaggacccaattgtactaatatatatatatatatatatatgtttatatatatataatcaaatatatataatcaaatatatatatgtaatcaaatgttacacaagaatgacatgcaacatcctaggacaggcagtgatgatctgttacagtgcaaaatgttctgatatacttgagaaagccttgagaaaactttagtatggtaattaaactgttgggctttttgggagtgttgggttttgttgttgttgttttctgttttttggtttgtttgtttgtttgtgttttgtttttatttccaagaaatagtgaaatgcaatcatcatgagataatactattagcctttacataaaacctatttttattctgaagatatcaaatcaccctaagacaatacatgtaaagctaattttactcaaacaaatggcatgtttgtatgtatatgtatgagtgtgtgcatgcatgtgtgtatgtatatgtatgagtgtgtgcatgcatgtgtgtatggtaaaaacaaatctatagaaagtgtaagtactgggtggttctggcacacgcctttaatcctagcacttgggaggcagaggcaggaggatttctgagttcgagtccagcctggtctacagagtgagttccaggacagccagggctacacagagaaaccccgtcttgaaaaaccaagaaaaaaaaaacgtataaatataaagatttatttagatgaattggatgctatcaatccttgaaatttaaatttagttttgtttgtgataaccaaggaaatactcttttgtgaggcatgaagtctcaccccacaagcctcttgtggggattacagcatagggtttgcattgtggaggcaaacctttccttgctttggagttgagctttcattctcttctgtgttcttgagcaaagtaaactgaggtattactatcagcactgtaactcatgggaagatgttattttttcccattacaccaaccagcagggttttttgtattttttcctgtaagagagaacaaataagctgcaacagactttctcaaagctttgtagcttaaagtcttggtgctctagcggtttccgtgagcgacaattggggagtgctggggagtgcttagctacttttctgactttctgaggctacagggaagtgttagaatgtgctccatcttctgcagcctgtgcccagactccactgcaaaactgagaagggactataggtgtccttcacagccacagagttctagaagtgtgagcctctgttttctgctagccattagcaaatacacaaacacttgatcagagttgacctagcagcactgtgccttttctttattgatagaagagcaaaactttaaatagctctgtggttgtgggtttttttttttttggcctatttgtaataaaggtttaaaagtatttaaatatttgtttccaacatattaaatgagagatttttaacaacatatgcacaatagtgtatgcagtagatgatgttttattgatttagttccacatgagattaatcaacagggaagtttaccaaatgacaacctagcttcatcagttttgcacaagtggaaatacctagaggcacactgtgtatctgccgtaggaaagtcatagtctttatggaccaggtgtagacagtgacctccaatcacttattctatattcttgtcaatacagataagggattaagtactacctactcgtttgtttgtttctttgtttgtttgttttttgagacagggtttctctgtgtagccttggctgtcctggaactcactctgtagaccaggctggcctcaatctcagaaatcggcctgcctcagcctctcaagtgctaggattaaaggcgtgtgccaccacgcccagcaagtactaactgctctttaggagtcatgatcacataacatttttaagtaggagactagtgcattgctctctactgtataggatgccaatagcaaggctatactgaagataacatataaagttacctgatgagaatagagttgaacatttaatggactcagaaacatatctaacaatgtgctagatgtccctgtcagttactgatatgaatctcatctttgactggtaaattttaagtcatgaactttactttttatactttgcattcagtttaaacagtctattcactctattgattcttgtgtaatatatatctatatatatatacacacacatatatatatatacacatatatatatgcatatatataatttatataacatattttcttgcctgattggtcgcatactgtgtcttataacttcacattgctgaactgaaacctcttcataaattctaaagtagagcgcagaaaggaccaccttatttaatagtgcatcgataggatgtgattgttctcatccacatactgtctaaacaaggcttgatgattacattaggctatatatgaagaatagctgctccccacagtaatgtcatttctgtcaaattctatgtattagagaaatcttccactaaaggttgcttatccctcgtcaagcttagccctagaccagcatttcagctgaactctctgtaaacaggtgaagaagcctttggaggcttggaactgcattcactcacaattacctccttaaacaaatataacctttatgagaattaccaaattagacatgtatagaaaatagaaagtgctaaacatttaaaatgatgatttgtttctttcttccaagcgtgagaaaatcacacagctctgacaggagctgcccttctaattaccacctttgtctatgcccccacccagaaatagcacatgactgtattctgaaaacacaatggattcacaggaatttgcctgtctttcatagttctgagaggataaaaggacttggtttgaaaagtctctgctttcctgcgctgagctctcttattttaaaaaacaaggaaccaagttccttagagctttgcttttaactaagcattgtctgctagtcactctgcctcagatgggcccaccaatggttatcctctccctatcctcatgtcttcttcccctggaaaaggaatgaaaagcagaaggtagtaagcgctttccttgtgttttgctttgctagaggtgggaggtctcacctccaatcaagaggaggtaacctgtgtgaataatactgcattccgacttgctgctacattaaccatcctgatgggttctagtttctgactaatgaatgcttaattagaatgttcccaaatacacaaacacttgatcagagttgacctagcagcactgtgccttttctttattgatagaagagcaaaactttaaatagctctgtggttgtggggtttttttttttttttttggcctatttgtaataaaggtttaaaagtatttaaatatttgtttccaacatattaaatgagagatttttaacaacatatgcacaatagtgtatgcagttctaagtatggaaccagtcctggagctaagaagtcttcatcagctttacaggtagaagtttaccattacaaggtgttgaaacaatagaccagactccagcataagtccacaacctaacaccttaaccaggtttctttaaatcactctattaacagaatcactaaccattggttttctatataatacttgaataggatttctaaaatattcttactaagcacataaaatatttaacatggagatactgtccatatattcagtgaaatagtgtatatagttgtacagaagtcacatcttcatctagttactaattaataattgatattgtatgtatcagattatatgcaataattttatgtggaagtcttggtatttgattttgaacataaataaatagtaaaaaaatttacacagtacatgtgtttaacctatttaaaactttattcagtaaaagcattgtgcagtatatatatgaaacattgcctgactttttaatcatgtcttctgtatcagttaaaattaaaatagaaaacttctattgtaaatctaagcttgcagaggaagattaaagctctataaacactgccatgtgtaaactgccaaggtttgtgcatggttaatattctggagacgtgtgctttatctcaatttgatgacattaagccatttgagagtaagatatatctacagtgctttgcctgccaaacttgtccatcctactttcagggagcatttcttacagtaggattgtcacgttcacatgctgtctattgatcaagttgtgaatattacattaacacaacactttttattttgtctgccacccaaactatcctcttgtcatctgactcaataatgtcctttactgcatttcattttacattgaggcatctaaacaaggatcactttttttgttaattagatattatctttatttacatttcaaatgttatcccccttcctcatttcccctgtgagaaccccctatcctatacacccacacacactgctcaccaacccacccacttctgcttccctgttctggctttcccctacactggggaatctatagaaccttcacaggaccaagggcctctcctcccattgatggccaacgaggccatcctctgctacatatgcagttggagctgtgggattctccatgtgcaattctttaatataagttgctatttatcttctgtctttttaaatcatgaacaacctcctagctttaaaatatgaaaatgagtagtagtgagtaacatggtcttttttttttattagaatgttactaattttgaatttgatgcttcatcattagatttcaaatttttatctcttatccagcaagtgacctatgtgaaattgtgtactttcagggtgttacctctgctagcatacaatgttggttttcttttattttgtgctacaaggttggcattcatatatgtgcgtgtgtataacattttaggggataggtaataggctttcatatgtgtgtgtgtgtgtgtgtgtgtgtgtgtgtgtgtgtgtgtgtgtgtgtgtatatatatataaacattttaggggataggtaatgcctgatgtaatagaaatataccagatcttaatcaattttacctgctctaatgagtttccaaccagactttcagtaattttaagcatggaattagttgatgcactgaagatgtttgatagtaaaattgttcaaatcctgtgatagtgattataaaaattacttaagttctcatggacttgaaacacggtatatgtgaacacattctaatcagtgatgctaagacatgtctcacagaacttcctttaaatagtaaaatatcaatgtagaatggcatatttactcctgtaatgaaaatagattgtgaaaaacatcataatatcatcatcatcatcattatcattgccatggtaatatggctttgagacaactataatcacagagaattacagagaaagattgttatctattttgtaaaaatacttttaatgtttaggaagctagaattatttttcctttggaaataaattcctataagcccaaagagtgtgtctacctgcctgactctcttcagcattctctctaagacaaggtcaattggagatgaaattgccatgccaggagtttgcctgatcatttttaatcttttcatttctctgtgtccagccatctccattaaaataccttctttacaaattctccagtccaggttttgttgctgatgtaagtgtttagttttccatatagaattgatgttcatcccagatcccatgaggatctctaggtctagttccacccacttcagtggatcaaactgtcaatgtttgaatatctgtttgcaatgaatgcttatctagagtctccttacagaaaagacagtttcttcttcactgtgtgtctaaaggtatttttgtcatctgtctatgaattataacttttaaaagccttctataaactggcctgagtccccacttatgaattttcttcctaaaaagtatttgaatactttcatcaatggtaattttcattcttatgcttgaccaccatcaagagctacatgtgagagtctggggttagctctatggtaaagtgcattggaaaggctttttttttcatgtgaaaagatgaacagtagataaattgtcaaagaccttggctttgatgcccaaaacttcctaaataataaataataaaatacattatttgcatgttggcttagtaataaatttaatttatttttatttcagctgggtgtaccctgtgtaccatattagtctaccaaataatatgttagctacttctactggtttattgaaattacccaaacctaatgttcccctttagaatttagactatacctgtttgctagaacatgactacttggtcttgtgaaaagcacgcaagcaagacttagggtacgttctgctcaaatatgatccaattctatgggcttctgattcctcagatatgagctttaattaaaaatttttaaaaatggttacaacatcattcggttttactttttaattatattgggacataacctcagatatattagtattcaaacatctggaaatcacttgcactgttgctatctgcatttcatgagaagaaattatgtttactcaggatcctcctataaactggcctgtgctgaacatcgtctctcttaaaatatttctcatgttcaatgtagactttgtgtctctgcctctttgcttcagcagtagcagaatgttcttactctaaatataaaattataaaaaagcaagaaacaatattttctttaattagcctcttcctttgggggttttagaagagaggttatgacttgacaaagatccttcccatctgttcctgtttgtttgcttttattttgacttcctttcgttgtcttatcaaatatcacatgaatcattaacatttgttttcatcgcttgttttgatttcctttgcttcacatgattaagacattatgttgatgcaaggttcaggctaacatattttatattaacctcatattctttacgcaaatattaaactttctagatatatgattttctgtgtttgctttcttctatgttaatattttcttccactccagggtagtaaagcatgtgtggatccaactgtttcgtgaaagctgcagtctttgtcagaatacacatgactcgtatgggttttgagtacataggtgccatttttaataaagctatttcctcatcagatatacagtttttaaagcctttaggcagagggtaggtaggtaagatatcctggtagatgtttgtaaggaatctctatttaaagttaaacatctcctcctttgctttgtgatgcttattcacaatgtgctccttgtactgatattcatccacaggcaaatgacattctcttaagatttaataaaacaatttgaaattattgtcacttaaatgttctagtctgttatgaaattatgttaagctatgtgattaatagaatgatatcttactagatttagaaaatttatttttgttgaatagtgagattttcatatgtggagtagaaaaggaagttttcattaaacattataaataatattcaaataacaatacatatcaaactaaacttatttttcaagcacaaaacaaaggtagaaattttgtaacagaccccttttgttcacatcttattcataaacattaattttatataaaatccatgtcttcattatggtttcattgctgtgaagagacaccatgaccaaggcaactcttgtaaggacaacatttaattggaactggcttacagtttccgaggcagcatctaggcaggcatggtatgggagaagctgaaagttctacatcttcatctgaaggccactaggagaagaaacttccaaacatctaggatgaggttctttttttttttttcttttttctttattggatattttctttatttacatttcaaatgttatcccatttcttgattcccctctgaaaaacacccactatcccatctccctccccctgatcaccaacccacccactcccacttcctggccctggcattcccccacactggagcatagagccttcatagaacaaagggcctctcctcccatttatgtccaactaagcaatcctctgctgcatatgcagctggagtcatgagtcccaccatgtgtgctctctggttggtagcttagtccctgggagctttggcggtactggctagttcatattgttgttcctcctatggggctgcaaaccccttcatctccttaggtcctttctctagctccttcattggggaccctatgctcagtccaatggatggctatgagcataggatgaggtccataaagtccatgtacacagtgacacacctactccaacaaggtcacacctccaaatagtgccatacctttggccaagcatattcaaaccatgacattacactccatggccccgaatggcttgttcaaactcatgagtcaatgggggctacacctagccattgcataatgcaaactacatttagtccaactttaaaaatcacatagtctataacagtttcaacaatgttaaaagtctaaagttcaaagtctcatctgatattcatcaaatcatttaactgtaatctcctacaaaatcaaaatcaaaaagcaaatcacaagcctccaacataacagagtatacattaccattatacaatgtcatagtgagaaaacactggaccaaagaacaaaagactgtgggaaaactttgcatctccatgtctgatgtcaaaacactcttcagatcttcaactcctttctttcctctttgtttaccacaacaaacttctttctcctgggctgattccattccctgttagctttctcagcaggtatccattttctctgaaatctctaacatcttggggtctccaaggcaacttcagtgttgcttcttcagtgtctgggatccacactcgatggtggaaggaacacaaaactagatcaggcttaatcttcctctgagtaaagattctaggtttaatatttaagcttgcacagcttaaataattcaaaaaaaattcagaagttggtttgaatggttggctgaagcatttatcaaagatggcctactgaaaaggagtagaagatgcctgatattccacggcttagtgtcgatgaggggatgttaaggcagcacaattacaatgctagagtgggtacatgtataactaatcctccacaatgggaaggcacagaagacattctctttgagaatcctgtaagatggaaatggttaaaggggcaccagcatattgaagagctttgttgtcaccctttttcttgtgccagaacttagggttggagtagctgttgctcaactcgataaattaaatgtaatggatttgattgcatcctgaggtagcaggggccaggtcccagcaccaaatcaccagaggcaaggtgatcatagttattataataggcagagtaagccaaacaatgttcatagtgacctaacccataatggtgagcagaggtgaggtgaattttataatggcatgactcatatggagctttggtattggctaaacagtcatggtgtttccaggcatgaaatagatagaatgcttgcattggattgaggcaaaaggcaatctcagccagtgaatcaatttccagatttgagccactttgtagactaagaaccccttgaatgaagtggtggccaggttcccttgagggaaggttcccctggtaaggtccagaacaaagtcctgtgtttaagccttaacaccctgtaaatcctcaggggcatggtgacacatatctgtaacgtcatgactaagaaagtcagcgggtccatcagaaattcgtaggcatcctcaactaaaagtaagtttgacatgaactgggctagaggagatcctacctccaagataaacaaacaggagaaaactggcttttaggcagctaggagaaggatctcaagcctacctccacaatgacacgcttcctccaacaaggacacacctactccaacaaggacatacctcctaattgtgccactccctggggcaagcatattcaaaacaccacaatccataaacttaatatagtctgattttatgatttttaacattagtattaaactctgaggtcatactagattcagtgttagatttttggaacatttacctagcatttcaaggcactgagtttaattttcagaagaaacgaataaagcaagaccttaatcgagttcacttttattaagatatttaaaagatttcttcattttgctatgtgtagatttaaatctgcataataataagcagcatacaaaactacacacctgtgataaactattcagtgatcaagatactttcttgtataccaaattatagctgcaactatcaaatcacaatgaactttaaaactattaggaatttgtaatttaaatagtttcactcaacccctactcccaaatgcttttaattagaacagactttttaattaagtactcccatgcacaaagtttagcctgttgattttcctgtcatatcaacctcccatacaaaagcaaataatcattgtgtcacagaaaaactgggctgtctctattgaaactagaatataagaactccagttttgattacaagctactcagaggaaaggaaagacctagaccccgaagcagaactcaatggatgagcaatgagcagagagtgcaagtcagagactctggatttcttcccgtctttagttaaggaaaggatgcataatggagtggacacagaatctgtattctattactataagatcactgcatttctatttgttgttctgtggcaccttgcgagacacaaagactcactgcatttctatttgttatcctgtgataccttgtgagacactaaagttcttcatgaattccaatcctcatttgggtaaaacagtataaaaaaatctgtatttttagttacagggaagtgtagacaacaataattttatcaattcttttagaattttattttgcccattcaaggtattttttattatattcatgtaatccaaaaaccaggtcccgaaattgctctgaaatacatttcttcctccaaatattttaataacttgagtcctatttgtgtttcccatatatattctcatgggtgtggggttacccactggagcatagtccacctaccatgtgacctttagcaaaactgaatcttctttccccagaagccatcgactgtcggtagcttttagtggggtgagggacttctggtactctctcacttcatgctggctcaatctgatacaggtattgaacagccaaccacagctggtgcatgagatgagtgtggtgctatcatgttcagaaaacactaatactccagtctcacctgcttactcttccagagtggtctgtgaattgtgtggcagtgagtagagggcaatgtaaatgtcccagttttcgctgagcttcacaggtacatattctctgaagcttcaccagttgtaagttttggtattaagcactgtccattataaccagtaattttgacccaattcaagagcagcactattctatgggtttagagatttgagtttggaggacaaatttgatgctgtgtccatttagaaaaacaatagaagtaagcccattcttgggacctaccaaccacgagttcttgactagttttacattatcagatacacctttcctcccgtggccctggccttatatccaaacagaaagcagtcaggaatccccatacatatgtgccatgaaaccatactcatgtgctatatgcatgggagtatcttaccacactggccatgacttccattcctccagcttcctgtggagtacttcccagtattataaaggacggatcctgatcaataccaacttaatttttctgtctcgtgtcagtaaaatgtgtagtgtctgaagaattgaaaatatggtagacaaccagtaacagtggcaatagcttgggttgcttaggggagcttcaggacaaccttaaccacatacagttaaggttgtacacatacaactgaagtgtgtcccacagaaggcacaggttagagtataatatagctgaaaattgtacttatgttttatttatattttgcattggataattaatttcttatttttatttttatttctgtttcattcaaatagtttatacaatatgtccaagatttcactattttttatttcccacagaattatattttaatctccagtaatatatttatatcttaacttctattcattcagttcatctcactagaggaaaaaaaacaactctattgatggctaagatatcattggtggctttcatgaaaatagttacatgtgtgcacaatagctacatcacacggcatatttaacaacactgctagagagtgagcagagcctttggctttcatgatggagatacacctgagtgcactctcagaaaatttggttctgcaagcttggtgggagtaattgtcattcagcagaaagtcactagctttgcatatcagtaatgcacacacacacatacacctatctattttctgagtggtctgtaactgatatcatttcagcgaatatatatttatgagaactaaaaattctgtatccttgatcctatgaactcatgtaattgggaaattaattttgagaatatatgaaaactgttacatcctaagcaagtgaaagtaaaatagaaaaccaggatttcataccaaatttcatgtttcctacgcctcttgaatactgtgccattaattatttttatcatttgttttagatggaagactgtatttgaaaactactgtcatgtactgaatattccttgttgaagaaacacgtcatctactagagaactctggaggcagaccttcatcgtcggaaagttcaggaaaaaaacaaagtccatataaaagaccttcttcaattttgtgtgttagtgctctctttcatttaagtattccacaaaggcagaaaagtttcctccattgatttttttttcacccgtggttcataccagagactgagaatgtttgtaaatgtacacatatcaaagttcttacagttaatagctcccctgtgctgctggacacttgtgtagagagctaaagacaggtctgaggaagaccgagctctggtttgttttctttttcttcttaatggaatgaactttttttccctcttctgacagttctgtaactgagcacatcagcagactttgtagcagctcacccagacttacagaattgtgtcccacagaaaccagcaagaatctatgggataaactttgaagggtcatagaggattctgggagggggaaatgagagaagtgagagtattctgttacatacaattttaaactctataactgcagg

SEQ ID NO: 494 - DNA, 2247 bp, Mus musculus
accatggcagtgccggcggctttgatccctccgacccagctggtcccccctcaacccccgatctctacttctgcttcctcctcgggcaccaccacctccacctcctcggcgacctcgtctccggctccatccatcggacccccggcgtcgtctgggccaactctgttccggccggagcccattgcctcttctgcttcttcttcagccgcggccacagtcacctctcctggtggcggcggcggcggcagcggaggcggcggtggcagcggcggcaacggaggcggcggcgggagcaactgcaaccccagcctggcggccgggagcagcggcggcggcgttagcgctggcggcggcggcgcctccagcacccccatcaccgcgagcaccggcagcagcagcacagcagtagcagcagcagcagcagtagcagcagcagcagcagtagcagcagcagctgcggccccctccctgggaaacccgtgtactcaaccccgtccccagtggaaaacaccccccagaataatgagtgcaaaaatggtggatctgagaggggccaaagtggcttcctttacggtggagggctgcgagctgatctgcctgccccaggctttcgacctgttcctgaagcacttggtggggggcttgcacaccgtctacaccaagctgaagcggttggagatcacgccggtggtgtgcaatgtggaacaggttcgcatcctgaggggactgggggccatccagcccggagtgaaccgctgcaaactcatctccaggaaggacttcgagaccctctacaatgactgcaccaacgccagttccagacctggaaggcctcctaagaggactcaaagtgtcacttccccagagaactctcacatcatgccgcattctgtccctggcctcatgtctcctggaatcattccaccaacaggtctgactgcagctgctgcagctgctgcagctgctaccaatgcagctattgctgaagcaatgaaggtgaaaaaaataaaattagaagctatgagcaactatcatgccagtaacaaccaacatggagcagattctgaaaacggggacatgaattcaagtgttggcagcagtggtggttcttgggataaggaaacactgcactctcccccatcccagggatcccaggctcctgttgcacatgcccgcatgcctgcagcgtttagccttccagttagccatcctctcaaccatctgcagcacagccaccttccgccaaatggactggaacttccttttatgatgatgccccaccctctcattcctgtcagcctacctccagcatctgtcaccatggcaatgagtcagatgaaccaccttagcaccattgcaaatatggcggcggcagcacaagttcagagtcctccatccagggtggagacatctgttattaaggagcgtgttcccgacagtccctcgcctgctccatctctggaggagggccggaggcccggcagccacccatcctcacaccgcagcagcagtgtgtccagctccccggcgcggactgagagttcttccgacagaatccctgtccatcagaatggcctgtccatgaaccagatgcttatgggtttatccccaaatgtgcttcctgggccaaaggagggggatttggctggtcatgacatggggcatgagtcaaaacggatccacattgaaaaagatgagaccccactttccacaccaaccgcaagagacagcatcgacaaactttctctaactgggcatggacaaccactacctcccggcttcccatctccctttctgtttcctgatggcctgtcctccatagagactcttctcactaacatacagggcctcttgaaagttgccatagacaatgccagagctcaagaaaagcaggtccaactggaaaaaacagagctgaagatggattttttaagagaaagagaactaagagaaacactggagaagcagctggccatggaacaaaagaacagagccatagttcaaaagaggctaaagaaggaaaagaaagcaaagagaaaactgcaggaggcactagaatttgagacaaaacgccgtgagcaagcggagcagacactgaaacaggcagcttcagcggacagtctccgggtcttaaatgactccctgacccctgagatagaagctgaccgcagcggagggagagcagatgctgaaaggacaatacaagatggaagactgtatttgaaaactactgtcatgtactgaata

SEQ ID NO: 495 - protein, 744 aa, Mus musculus
MAVPAALIPPTQLVPPQPPISTSASSSGTTTSTSSATSSPAPSIGPPASSGPTLFRPEPIASSASSSAAATVTSPGGGGGGSGGGGGSGGNGGGGGSNCNPSLAAGSSGGGVSAGGGGASSTPITASTGSSSTAVAAAAAVAAAAAVAAAAAAPSLGNPCTQPRPQWKTPPRIMSAKMVDLRGAKVASFTVEGCELICLPQAFDLFLKHLVGGLHTVYTKLKRLEITPVVCNVEQVRILRGLGAIQPGVNRCKLISRKDFETLYNDCTNASSRPGRPPKRTQSVTSPENSHIMPHSVPGLMSPGIIPPTGLTAAAAAAAAATNAAIAEAMKVKKIKLEAMSNYHNNQHGADSENGDMNSSVGSSGGSWDKETLHSPPSQGSQAPVAHARMPAAFSLPVSHPLNHLQHSHLPPNGLELPFMMMPHPLIPVSLPPASVTMAMSQMNHLSTIANMAAAAQVQSPPSRVETSVIKERVPDSPSPAPSLEEGRRPGSHPSSHRSSSVSSSPARTESSSDRIPVHQNGLSMNQMLMGLSPNVLPGPKEGDLAGHDMGHESKRIHIEKDETPLSTPTARDSIDKLSLTGHGQPLPPGFPSPFLFPDGLSSIETLLTNIQGLLKVAIDNARAQEKQVQLEKTELKMDFLRERELRETLEKQLAMEQKNRAIVQKRLKKEKKAKRKLQEALEFETKRREQAEQTLKQAASADSLRVLNDSLTPEIEADRSGGRADAERTIQDGRLYLKTTVMY

SEQ ID NO: 496 - DNA, 3018 bp, Mus musculus
cgctcgcccctcctgcgctcgctctttcttaacctcacctcctttttctcctcttctctccctctctccaactaaggttccttcctagagtgcttgttgtctctgcccccccccccacctcgatccttgtccccctttctcccccttcccctttggggggtgtgtggcaacttttccccctcgcttctcctccttctgtttccccttatatgtgaccatggcagtgccggcggctttgatccctccgacccagctggtcccccctcaacccccgatctctacttctgcttcctcctcgggcaccaccacctccacctcctcggcgacctcgtctccggctccatccatcggacccccggcgtcgtctgggccaactctgttccggccggagcccattgcctcttctgcttcttcttcagccgcggccacagtcacctctcctggtggcggcggcggcggcagcggaggcggcggtggcagcggcggcaacggaggcggcggcgggagcaactgcaaccccagcctggcggccgggagcagcggcggcggcgttagcgctggcggcggcggcgcctccagcacccccatcaccgcgagcaccggcagcagcagcacagcagcagtagcagcagcagcagcagtagcagcagcagcagcagtagcagcagcagctgcggccccctccctgggaaacccgtgtactcaaccccgtccccagtggaaaacaccccccagaataatgagtgcaaaaatggtggatctgagaggggccaaagtggcttcctttacggtggagggctgcgagctgatctgcctgccccaggctttcgacctgttcctgaagcacttggtggggggcttgcacaccgtctacaccaagctgaagcggttggagatcacgccggtggtgtgcaatgtggaacaggttcgcatcctgaggggactgggggccatccagcccggagtgaaccgctgcaaactcatctccaggaaggacttcgagaccctctacaatgactgcaccaacgccagttccagacctggaaggcctcctaagaggactcaaagtgtcacttccccagagaactctcacatcatgccgcattctgtccctggcctcatgtctcctggaatcattccaccaacaggtctgactgcagctgctgcagctgctgcagctgctaccaatgcagctattgctgaagcaatgaaggtgaaaaaaataaaattagaagctatgagcaactatcatgccagtaacaaccaacatggagcagattctgaaaacggggacatgaattcaagtgttggcagcagtggtggttcttgggataaggaaacactgcactctcccccatcccagggatcccaggctcctgttgcacatgcccgcatgcctgcagcgtttagccttccagttagccatcctctcaaccatctgcagcacagccaccttccgccaaatggactggaacttccttttatgatgatgccccaccctctcattcctgtcagcctacctccagcatctgtcaccatggcaatgagtcagatgaaccaccttagcaccattgcaaatatggcggcggcagcacaagttcagagtcctccatccagggtggagacatctgttattaaggagcgtgttcccgacagtccctcgcctgctccatctctggaggagggccggaggcccggcagccacccatcctcacaccgcagcagcagtgtgtccagctccccggcgcggactgagagttcttccgacagaatccctgtccatcagaatggcctgtccatgaaccagatgcttatgggtttatccccaaatgtgcttcctgggccaaaggagggggatttggctggtcatgacatggggcatgagtcaaaacggatccacattgaaaaagatgagaccccactttccacaccaaccgcaagagacagcatcgacaaactttctctaactgggcatggacaaccactacctcccggcttcccatctccctttctgtttcctgatggcctgtcctccatagagactcttctcactaacatacagggcctcttgaaagttgccatagacaatgccagagctcaagaaaagcaggtccaactggaaaaaacagagctgaagatggattttttaagagaaagagaactaagagaaacactggagaagcagctggccatggaacaaaagaacagagccatagttcaaaagaggctaaagaaggaaaagaaagcaaagagaaaactgcaggaggcactagaatttgagacaaaacgccgtgagcaagcggagcagacactgaaacaggcagcttcagcggacagtctccgggtcttaaatgactccctgacccctgagatagaagctgaccgcagcggagggagagcagatgctgaaaggacaatacaaggtaggaaactgtatttgaaaactactgtcatgtactgaatattccttgttgaagaaacacgtcatctactagagaactctggaggcagaccttcatcgtcggaaagttcaggaaaaaaacaaagtccatataaaagaccttcttcaattttgtgtgttagtgctctctttcatttaagtattccacaaaggcagaaaagtttcctccattgatttttttttcacccgtggttcataccagagactgagaatgtttgtaaatgtacacatatcaaagttcttacagttaatagctcccctgtgctgctggacacttgtgtagagagctaaagacaggtctgaggaagaccgagctctggtttgttttctttttcttcttaatggaatgaactttttttccctcttctgacagttctgtaactgagcacatcagcagactttgtagcagctcacccagacttacagaattgtgtcccacagaaaccagcaagaatctatgggataaactttgaagggtcatagaggattctgggagggggaaatgagagaagtgagagtattctgttacatacaattttaaactctataactgcagg

SEQ ID NO: 497 - protein, 745 aa, Mus musculus
MAVPAALIPPTQLVPPQPPISTSASSSGTTTSTSSATSSPAPSIGPPASSGPTLFRPEPIASSASSSAAATVTSPGGGGGGSGGGGGSGGNGGGGGSNCNPSLAAGSSGGGVSAGGGGASSTPITASTGSSSTAAVAAAAAVAAAAAVAAAAAAPSLGNPCTQPRPQWKTPPRIMSAKMVDLRGAKVASFTVEGCELICLPQAFDLFLKHLVGGLHTVYTKLKRLEITPVVCNVEQVRILRGLGAIQPGVNRCKLISRKDFETLYNDCTNASSRPGRPPKRTQSVTSPENSHIMPHSVPGLMSPGIIPPTGLTAAAAAAAAATNAAIAEAMKVKKIKLEAMSNYHNNQHGADSENGDMNSSVGSSGGSWDKETLHSPPSQGSQAPVAHARMPAAFSLPVSHPLNHLQHSHLPPNGLELPFMMMPHPLIPVSLPPASVTMAMSQMNHLSTIANMAAAAQVQSPPSRVETSVIKERVPDSPSPAPSLEEGRRPGSHPSSHRSSSVSSSPARTESSSDRIPVHQNGLSMNQMLMGLSPNVLPGPKEGDLAGHDMGHESKRIHIEKDETPLSTPTARDSIDKLSLTGHGQPLPPGFPSPFLFPDGLSSIETLLTNIQGLLKVAIDNARAQEKQVQLEKTELKMDFLRERELRETLEKQLAMEQKNRAIVQKRLKKEKKAKRKLQEALEFETKRREQAEQTLKQAASADSLRVLNDSLTPEIEADRSGGRADAERTIQGRKLYLKTTVMY

SEQ ID NO: 498 - DNA, 429212 bp, Homo sapiens
atctttgatcaatgtacttgccagggagagcccaagtccttcaaacctcctccttttcaccttcatccttaactttgtgctagagcgagacccacacaacaacagccgaccctccccgccccacccccacccccaaaccagccctcgatcccagcccccggagaggactcgcatttcgacttgcgggacacttttgtgcgttcctctccagagcgcctctcgtgctcgcccctcttgcgctcgctctttattaccttcacctccttttctcccccttctctccctttctccttctcgttctctcccggagttgttgttgcccccctcgctccttctccccccttttttccccttcccctcccgggggtgtgtggcaacttttcctctcgcttctcctccgtctgtttccccttatatgtgaccatggcagtgccggcggctttgatccctccgacccagctggtcccccctcaacccccaatctccacgtctgcttcctcctctggcaccaccacctccacctcttcggcgacttcgtctccggctccttccatcggacccccggcgtcctctgggccaactctgttccgcccggagcccatcgcttcggcggcggcggcggcggccacagtcacctctaccggcggcggcggcggcggcggcggcggcggcagcggaggcggcggcggcagcagcggcaacggaggcggcggtggcggcggcggcggtggcagcaactgcaaccccaacctggcggccgcgagcaacggcagcggcggcggcggcggcggcatcagcgctggcggcggcgtcgcttccagcacccccatcaacgccagcaccggcagcagcagcagcagcagtagcagcagcagcagcagcagcagtagtagcagcagcagcagtagcagcagcagctgcggccccctccccgggaaacccgtgtactcaaccccgtccccagtggaaaacacccctcagaataatgagtgcaaaatggtggatctgaggggggccaaagtggcttccttcacggtggagggctgcgagctgatctgcctgccccaggctttcgacctgttcctgaagcacttggtggggggcttgcatacggtctacaccaagctgaagcggctggagatcacgccggtggtgtgcaatgtggaacaagttcgcatcctgaggggactgggcgccatccagccaggagtgaaccgctgcaaactcatctccaggaaggacttcgagaccctctacaatgactgcaccaacgcaaggtgagtcgggggggatagcccccgccgcccgcgccccttcccaccagcctgctcgcctgccctcgctcctttcccggcgccgctcgctctgcgcgcccgcgagccgcgcgccccggcgagcgcggccctctcctctccctgctcggggctcgccagccgcgcccgaccccctgagaagttggcacctcaccctgcccagacctcgctcttcggcccggtcctccccttgccctctgggtcccggggatgggctgctgtgggatgcgggaaagccgagcctcggggcggaggggacgagagggaggaggacggcgcctttgctggagccacagccccctgccccgggcgcgcgggcgcctggagacccctctcagcgctgctgtccgcgttcgtgcgctccccaggacctgggttccacggccagcctcccggcaccgacagggctgatctgtggcgccgagcggtgtcccgggggcggggggaggtcgtgacctgctccgcagggctcggggagcggggagacgcgctccgggtgagggccccgctgggaaaggcgagggagcgggccagcacccgaggagggcactttgaggtcgggagggaaatgacccgcgaagctgagagaccgggtccatcccgggggatgagctccggggacttgagctccgaagcccggaggggaagccagccgaggggaggggtctgtgtgttcgcgcatgtgtgcgtgtgtccgcgtgtgagcgagtgcgtgtgcaaaggaaataaaggggtacggtggccccggggcagatgcgagggcaaccagcaggttttcttcggtagggggaggtgaccgattgcccgagactcaatggaagctgaactggagagattaggaaggaaagccacggagcgcgctctctctcgatctctctttcgagttctctgtctctttctctccaaagtgtgttttctttctgtctttctctctcttttcttttcttaaatgttagtagcttaagcagcgagcaggtgcacactttgcactgggatgctcagcggccctgatactctgtgccttggcttccccagcccagcaaagcgcgcgcacggaggaggcggcgggaccggtccccagccagaccagttttatgctaatgaacgctcagtgggggaggatctaccaagagggggcgggagtggggcaacttgtcagtttcggggtagagatgatcattccaccccctttcacagcgccgctttgtccccacggttctctgcaaggaagcgcagaggcaaaagttcagagtgagattccgggagaaagaaaatagggaaagttgaagacctgaagcgggcacgtgggaactgcgcgcaaaatttgcgcagaaacttcggtaccctccaaataagtttgaagattgagagaaggagcggagttagtgtgtgctcccgcagagatagggaaacttaggtggaaaggaagtgtagcaaggagaccagaaggacattgggttgaaaaagcgctagctcttttttccatggagaaagacttcttctctgttagtgcccgggaaggctgtgaaacgaaaaagattcgaattccagtccagcaaatgtcctatcctgacctagccagaaattcttttccgtgtttaggtattcttccttccatgggacttgggtgtgtttgggctttgaaccttcgactattttggggtaaatgttgtgtgtgtgtgtgtgtgtgtgtgtgtgtgtgtgtatgtgcgcgcgcgcgctcaaaagtatggacaggtggcagtaaagatggggggtggtgggggtcgcggaagcaagatcactaaacgtcatttactcagataattggagttcttggtcgtgcagaatgtaaaatatttgcccaaaatctatattaaaactatttgaatcaggacaggaaaattgttctggagttatgaagaaagctaggtgaaatttgaagctagttcagatacgattgttataaaattgtctgcctatccagtaaattggtgaattgctactttttttttctctttaataatcaaacatctactctcctcggtatcctctttatgtgtttcttacagcacactagatactagataattaaaggccatttcacatacacacacgtaaacacaaaaaattactggagaaaactttcttcaatgactgcattataataaatgttataatcaatgttaaactcgatttattccctgaatttttgcctagatttgaagtcctcaccatgtggttggagaatattctttaacttttaactaaatatttttcaagttttttccccctgaggttaacaacagatctggagtttaaacttgcagagccaagataagttaaatccagtggaactgtttatctcttcacaaatatctcatcactactgtaattatgtttcagtcacctggccttaataatttgcaattacatgtgttgctctaaaaccctatttcaagttatttttaagttaaaggcgggaagtttgttgatttagtattgtatttgatcatatatcaactaaaaaagcttactcaaacttaaatacatgcaatattgtagtcattaacttgagaaggtgtttagttgcaaatacctaccttggttttcctaactctgccactgattgaagaaattgagaacttgtaatggaactccctctcaccaaatatactgtttaccctatattattatttttaatgattattataagcattattgtcttatttcttacctttgaaagctttgaaatgttttgcatcttgcatttataaaattatgattacttttttcattcaagtcaagtttatatctttgctgtgaagaaccttttttattcacctagatgtattgatttatttcactttggtttctttctcctctagctacttaacaggctaagggagtaatttatgtagagtataagagaagctgagcaagaagggaaactgtataaaattactatctatacacccatatatgtgtgtatataatttatacatgcacatatcataatttatatacaatgagaaacatcaaatcttagcactctcagctttttacagaaactatgtctatctcttaatagcatggaataataataccagggattttgaggaaccgaaatgatgttacagaaaagtaaggttcataaacttgctcaaagtggctcagtaagttagtagcaaaccttcgagtggttttaatttgcttagggctattgcattagtatgttatctatgaaaactagaataaatgttgaagccatctgtcattaccacaaggaggtgaaaaagagactatcacctgctagacagtaaagctaaaaaataaaggtctcaaaacatgaaagaaatgtaaagctaaaaaataaaggtctcaaaacatgaaagaaatgtaaggacatatatttaaaagttgtcaaaggacaaagtctgtccttgatcagcttcctccaattattatttcaaaactaaacattagttgcatgaacttggctgttgcaacagaggtcagttaattaactgcttaccattaaataacaacaaaaaaagaaaagtaattatgtacatggtcaaatctctgtttgtataagtcagttccctttttgtagatttgggttaggattcaattttccacgaattcaggttttaaaaaagtgaccctgttttattatgttatctaaaatattcatttctttcattgttgtaagaagataattttttctcaggatctttcaaacaagattgtgatgtaggttctaagtaaccctagatttgaggggtttttaacttaagtagattccagttagtcttatatattttttaggcacatacatatattcacaaacagaattcttttgtcttaaaataccatccatggacaaaatattgaaagtgttttatgtttcagtagtaatatatgaatgaaattgtagtgtaagaagtacaaaacattttccaactcttgactctatttttttttttttttttttttggttaggagttttaataaagatggcaaaccgaaccagtctatatttatttaacatttgccctgttgcctggttttcaatgacacagacttatgcattgatatagaaagtttaacataaatatagattcacttctaacagataattacaatacttggcacagagaaattaaagaattgcttcaaatgaagagagactctgcttttgaagttttcgtattacagtagattaatgcttccaataacgcctaatgtctcattttatatcatttcaaaaagaatagggcataattagaagactaaagcttaaatatgaaagtttgcttggttccacaatttatttctgtatgtttttaaagtgttagcaaattacactttaataactagtgtatgaataaaatataagaatattctaacctagaatttactttgttcagtcaaattatactgcaggatataagttgttgagttatttggataatctcttccaaacctgttgtttttctaagagttagtctctcacaatatcgtggttatttttgtcaaaagtgaacatggttatgatgatactttactttctgaactccacatttagttaatgctctgatgtaagaaatttgatttgtacatatgatattttattttgtgaagcttcaaatattatataaaataaactacacgacaggcttttttcctctagaaaaattctggtattcacatttgacacatagttttaaaatcttcatttttttagtccaaatctgctttttttttggattattctattaaatctcactccagtttcatgtcaactactgggacaaatattaaccaccctctttttgcctcactgcatcccccaactccctgagatgtgacaccctatattgactaaagtcttggcaggatttgagcataaatcactcttgtctttggcgatttactacgtgtgattcaccagcatatgaaaacatgatatgctttattgtttctcatttgatgttttgtttttagagtataagtagcattagtaaattagcttaatgtgcaaccaagtagttgttattttaagaacaatttgtgctttaactatcaattagtattattttatctttccaagttattttactaaattgcttcatacaattgcttttgtcagtcaagtaaaatagtcatttcgattgcattgtatgagcaacatagaaaacaactactgcaaaatataatgggaaattaaactctcacaggttgtaaactgtctccctttgaatccttgtctgaagaaattaatttgaactatgccttctaaataggtacaggtgagtcatctagatttcattaaacatttttattttaaggtttttgttacttggttcttttaaaaagttaaactttgtttgaatttatctttcaagtatttccttttcagcttgttcaccaaaaaaaaaaaaaaagtcacattaagttatatatctttagaataacaggaaatgtaaaaatggatattattggcttgggtatttaaaaatgtaattaagataaagttttatcattttatgtttgaattgttataaaaatagaatgaccttagcatatgtcagcatgtgccattttcttactgaggtaatgctttgtgattggccagtttaagagatgtatatctgcatgcatgtgtgtgtgtgtgtgtgtacatacgtatgtctaaatactacatattatatgtagtatattaatatatttatatagtatatgtagtttgaatattctagctaagactacacttatattttcaggctttgggactgcattaaggagacccttctctattatgtttgttatgttcaataattaaatttttaaagaagaaaactatgaattaagagcccacctaatggagctcagataagtgtaacagcaaaggctctgatctgcacagatatgtacatctcaggcacagcagaggctctgtgcaaacctacattttgctcaaatttcttgtttccttcttctcaatctgccaaaaatatttctagtaaaaagtaatttttgctactgtggctgtcttgtaactaacttttatttgctgatattcgctttttagcaaatgtcacatacaggaatgacttcattaggatagtatagttagtttaccaaattattgctttggaaaacaagaataccaaggataagatatttatatttggtccactaattagttattattagattactggtggattactttatttgttacacctatttattttaaggaggtttctgagaatctgttaagagtgtgtccattgttgctagttttaggcagctaatgattagctttatatataaatgtacaaatgacaatgaaaagaattttcaatccactataaattagttattagacaatcaataaaaaggtcattgtttttcaaattaatgatacaattaaaattaatttaatgaatagcagataaatgtccaattaaaaaatatatgtcacatcacatataatgacccaaatcaccacttgatccaaagtcaaggaccttgaaccaaatgcatttaaaatgtattggtttattcggacatagatttcctttataagagaaaagcattcgaattcacccatttaaaaaaaatcatctttcattctttctaaattggacattaaatttgccaatgactgcattgtgttaaaggtgtggtccttttgctttctgatccaaattggcttggaattgatccaggatttcaagctgggattcttctgcacatttaaatgtatgtgacttgattggaagttgtcaaagacaactcattaaactggaaatctcactatgtcattgtttaattggtctttttttgttgttgttataagtatattgaagtgttgtaaactacaagcacagcaacacactgaatagccagttactttttaaaaaagttttagagagtagtgattgatactgagagagagacacacagagagagagatacagagagagagagagagagagagaggcagagagaggcagagagagagagtgcttaactgaagtatctataataatgtaccgtacaggttgaatacaatacctggaatacattacatttttctagcaggaagtaaaagtgaaataagccaggcacagaaagacaaatactgcatgatatcacttacatgtggaatctaaaaaagttgaactcatagatgcagagagtagaatggtggttaccagggactggagagctgttggtctaaggttacaaaatttcagttagataggaagaaaatgttgtacaacgtggtgattatattttctatgatttgaaaaatagaaataaatatactttgatttgactataagtagatctttaagaatcctgaagtggattttgaagatagcctatatttttgacaaaaaaaatatggatatacttttaaagcatgattttcatgaagcaaatactgcaataggccacatagtacattggttgatgttgattggtaacattgaataattgagaaatgtttttgtttccttagcgtatatgaatggagtggtaaacatgaagtattaaaaagtcacagtgttaaatgatctttgaatttgtatggtatcaagtgtttgtaaataattagattgcctttccagttacaacaggaaaaaaataaccttatttttcttcaagggcaaacaaaatatatcttaagaaagaaagtgtactacttgaaagggagatattttatggaaacatacagaagcatttgcagtaaatatttatcaattccatttaagggatactggtcatttcttcagtaaaggcaatgaaaataaatctctagaatatgttaactaagaaatagtgtattacattcacttatcaggcagatggagtattttgttaaaatcttaaactgtatcctgatattttattagtagcaacagtaaatgggctgttttattcatagtcttatattttaaagacatattgtttatgtatgaacaaagtaaatcacttaaggtgtaacaaatctttgaacccatcatagttctgctaaaatatactgatgcattcaacagtattactttctattttatgtttcaaatttaggatttttatttaatttgattattcaaaatgatattatcttcttgagttaggcacttacacttaaatagtgccttttgattttaaaagaataacctggaacacttttatttttcataatacctgtcacacattttatatgaggatgaatgttcttgtgtgtgcaacaagtgtaaaatttttatcagtagtttagagaactctgtggtggatattttttatatgtattagcattagctcatttgtactctatgctttaaataattgtcgtacatttggtagaaaagcctttacatacatgtatatgtgttgtgtaggaatacattcacacacacacacgcaaacataacatatacacctgtaggatgtagggccacaggacaaataacttaggaaaatacaattggctttaattttacctttttgtagcacataaaaacatgaaacaatacatcaataaacaggtcctattttactgaaatacaacagaaaaaaagaattaattttagagttaaagaagtagtttatacttaaatattttagatataattatgcaaggctatatggttattaggacagtgattaaaaacagcttaatttttctaaaccttttttatgataatgtactttaaattctctgtttaaaaatatatgtataagaattattttatttgtataaaatagatattaaacgattgggtattagaatctgtacattattaaatgacactacatgtgcttgatgcccttgctctctttcttttattggtttatttcattgcttcttgcacttagagccagcatatcctttagaatcagtgaataaatgataggaaaacaatttcataacataaaggaaaagagactgttctaaaagctttgccatcaatgagatgagttaggaatgaggtcagtgggttaatctgcaggtctacataaggagatgtgtattaccacttcttgcagtggactataattgtctttgaaaacacctagtaaagatccagttaaattgaaatcaattactttctcaataattccatggcctatgtcaagtcattacgtcatcggtaagagtgcaagcaggcatacattttttgcaacatagaaagacgcttataaaacagtgatgacttagaagtttctgcttcatctaaagcttatggaattaaaaaaactttgtacaaaatataaaaccttgtacacagtattcggtaaaaagttcatctttgcatttagatatttacataaatacaagtatttcacattactttttgcatcttctggtaggagaaagtataagtaagtgaaaatagtttcaaaatattttatgattgtcatctctgacacctttattcttaccctctaagaatgctctgataagtgtgtactataatcaaagatgaatatatgtctgctgttcactgatttttttcttacgcactgttgacagtatggtacatgcagatttgaacttgtagccaggaacagtgcttccatgcttcaaattgccaaaagacccccagggacagaaacttgacctgcttttatgaaaccatagaattacatttatacaagttaccccatgggaaaggaatgaactgatcccaattcaaaccttaatattggagccttctgggtcaaatttgatttttctttctgttaacacctgtttggctaccatatttagtacctttattcttaagaaattaaaaaaatattattcatcagtggtatttcacagttaagccaaagtgccatcaaaattttgcagctatttaagttttctcatgctattaaaatgttactttttaaaacaaaattcttctctttatgtatatatcctagatttaaggagtataaacacaaatttaattagatataaaaacaactattttgtactttttaatcaatttctctttactaatgagtcagtccaagtaggagaagaaacttttttaggaccttttccttgtaataacatttccaaataaggatttttctaggaatatatttaatttttcttagagtcacactttaaatggttatgtatctaattttgcttttagttggaccacctgacagggtttccagaatgctgcttttgctactactaataataaatgaaggtggtcactgataaactggatgcataaaagatatttttattttagctggattcactttacttacatgaaatgggcctaagttggacagctgaagttaacaatttgttccaaataaagaagaatttaggtgtgtagtagtttgcttcatttctgtactatgctatgtcatataaatgcaaatggataactgatataaatgggtaaggtcatagcatctctacttgtttgacagtattaaatgactgccattagattacagaatcaagacctacttctccatatagaaagacttgctctcaatgttgtatacaccaaaaacatcttatagatggtaaggcaacacatgtatatgctgtcacaattatgatggttaaataattccatcatcgggttttgaaattgaggtgagcaaattccttttcaaattaaaagttaaaaagaattccaaagactttttattcttttctcacttaacattgaataaaccatttggataagtggttattggttatttcccaataagaaccaaacataaaagtctctaataataattatactaaatcaattcttggaatagaggaaaaatattacaattgccagtggaaggtataccactttccttactatcataagtcatgatcatctaggaaaaactatttggagttttaaacatacattgttgattctttttctgttggctgctaagtgacaatccacaaacacttattttcactgtaaattaacaatttttctgccttggccttatacttatcatttgaatgaagatgaaaaatcatatcagttctttggctgtttcctagtatcacctgatgccatatttataaaataccaatatttaattatatacctaatttcatttaaaagtttaccccaactagtttcatggtgatttaacatggctattgcactccactctctctaactgtgatggaaggaaggaaagtaggtagatcataagatcattgtgctggtcttaaaagtaatctatttcagaaaaggcaacctaatctgacttttgtaatggtgatgatatgaagtttctatgaccttttttgtctttcagaggcactttctagctctctttccaataatgattgatgttacacaccacatgaactggaaataaagacacgttaaaaactcttgctataaaatgcatgaaaggagaggggaagttttattttgtaggcaatcctctaaaagtagagtaatccttattactgcacagaattgtacatgatactcaaaataggaagcctttagacaccaaactaaatttcatcttcttacatacccttgtcatccaaattatcataacccacctttattttttttttgaaactctagtgaaattgtgcatgaaatagaaacattttaccatgaaatttacctataaacatctagccaaaaacagaacaaactctggatttttgagctattgatatttagaacagatcccttaaattcaaaattgtgaaatataatacaattgtatttaattacagtattttattccaagcttaggaaataaaattaaaatggcatatttgatctggagtaaacttttttgctctcttttttttggagagtgggttaaataagggcccatgacaggaatgctgtttgtttttcacaaaagttgtttgtgatttcaggtacccttgggaaatctcttgatcagtttcacatctgttcctgtcaaagtgggtgctaagataccggtcacccagcaaccatgtccaagagggaattgggccgataataacttcaaaaaggaatgacagatgctagattaggatgaaagacaaaacgcatgaaaaatgagcttgttagaatcaaaaatttgttcaagcacctttatgcaaattaaatgaatattgaatatttgcatgcagtaatttctactttttcatttgattgaaaggaaaagaatagtgcatttaaactcacaaatgtgacttctttcttttgtactaattaacatacaaagcagaatctcttttttaaaaatcagattagccacctgggttcttagagctccactaagtatattataatgtttttcttatgaaaatggtacattttaagaggacttggtttatctaattttttaataataaacagtgtcatgtgaattaagattattttagatgaatataaatccatttcttgagaaagcctttcaaaagtaaccttatcctgttgtccttgaaattggttaatgtacattaataaaagatcactcaagatgagttcacaccaaaagcacagacttctcattgactggttaaataacaatgcattaaagtaaagcagagtggtgtgccctaaaagaaagtaggcagaaagatctcttcaaaatttaagatgctctttgatacattaccagtttttctattgaactgttcaaatactaatcagaatttagaagagcctgataaaatgtagtgattgagagaggtttctgagtcttggtttagcaatgtctaatgtggtcacgtagagaaattgattttcttcagaaattaattaatttttcatatcgccctaagctgcagttaaaaagagtgcatacttgtctgttttttccagaaatattgcctaatcatattaataccattgccccaaggatgaaaagataattgtacaaatgcatttggaaatatgtatcactgagtatttatgattaaattatgcaaatgacccagctctcatcctttccagacccagattgtctaattaggattgatatgctgaatagatgttccagaatttgaatacaagcatgtccaaggagcagaaaattggaaatgacaaggctgaaatccaaagaaaagtgtctttcgtttctatactttgttaatgtgctgttagcagttgagggttttttccctccctttggctattttgtggctcatatgtccttattagaaacaagtatgcaaaacaaattgaactttagccaatagcattttatttgtatttggtgcttatttaaaaataatctcttggtcattcaaagagagcatcgctattcctttgctccaaacaatgtaaacttacccttaattgggtgaatttttaagcaaacttcctctgaattaggatcacagctttatttcaaagctagctctctaaacttaatggtataccaggacagtattttctaaggatatgcttcttgaatctatagttcatttgttcattccttcacttaaatgcctatcttcttgtagttggagaacactgtttaagcaacagttctgattaggaaaaaaaaaaaaaagcagcactttaaatgtaacaatgtttgaatttgaggtcctcagcaggctttctccctcattgattacactcattcatctcagatggaggggtggtcgcgaagagcaaggaagggactgaactgtcaggactccagcctttgttaagcagcgggtagtcactgcctctgaactcggctggctcctgcttcccatctgcaggatgatggattgctatgtttaatacatttgagcttttgtctgtcatagtgtggacagacagtactatcagtgatttcaacagtgattagaaaacagtttcaaaccattcctattggccagagagcttccagaaatgtctgatgaaacatactcattggtactctcgccatgtaaacgtgtagtttaactaggcggagattgtacactcactgtttaaactgatgcagaagcccactgagaatgactaaaccacatatcaacttttgaagaaaatacacaagacaattttaagaatctctggggtctcaaactaaaaattcatccgaagtagtcccaagtttcagatgaatttgtattctttatatagtaacaacatgtgcttgatggcaggactgtattccataaattatgatgtcagttgttgctatgctcatcagtattgagctatctagcaatattggggtgggggttagaatgtgaggactatgtgaaagcagtaagacaggacttggcatgtgctacgctgggatttgctgagctgtgggggctttgtggttcacaagtccaaagggtgaatgatttcaacaacaagaaggccactatataccagctcagtattctccctggagtgtcttattctatttacaaaactgctgctaataaatacaattagctaaaggaaaagaaactattcttttaagccattaataatataggcaaagttttatttcaagaagggggcataataaataaatcaaaatggccaataacatcattatttactagttataatgtaatatactaaatgtaatgtaaattataatgtaaattataaaatgtgtttaaacatggagttttaactgtagcagtaaataggtaattattaaaataataatccaaccaaagttttgaaacaaaaacctaaatcaggagaagctacttgcctttgattaatctctattaagaaggaggttaaagacaaagtttatgtggtcaacagcaaatgtctgatgagaataagaactccagatcttagattatatttcctcttactgatgttctgacactgaaaaattttcacctggaatcctttcagtaaagatttctggtcttgaatatgtgatcgtaagcatactcatggacgtacatatcacagcacaaatgcgcacatacacacattgcatttcttttgaactagtacaatagctaaagattttgtcatttgacattacttgtttggtaataaggataggttgtactgtacctcctgaaagagttataaaaatattcacatattttacaaattgtcttgttcattgttgcattttaaagttattgaaatagtgctcagcttaaaagctgtgcattcattcagcatattctaaaggagtcatttgtcagagtgactcaaagacagtggccataagtccttctgtatggaaattatataactgggcttaagtaaatctgaatttttaaatccaaattttcacaatttatatagcacatatatagtgaattaatgtattactcctcaacatttttgtactgaatcatgtgtggtttttaaacttttaatagtgaaatattaagtagtttcttattgactttatacttgcacgtcggaggtgggcagggaagtggcgaagtgttcattcttttagagagggataaggtatagaaggaagctattagcaggtcatatctctcaaaatcactgtgttgggagggaggaatcttctatcaagtcaaagggaaatgcatggtttggacaactagagttaaggatcctggccttgcactcctagtggaagattgcatggaagggcccgaaggtgttgagtaatactctgttttaaagtagagctatctcatgaaatgaacataaattactctgttacattacttctctaactatttgttaataaaatttaaggaggtagccagtaatcagtagggacttagggtatcctgactgggagacagactttaacaagaggaaggaagttttgtaccaaatgtactgatgtatacctatgagagctgtagatccttccccaacatattataggaaatataagtgcttggcaaattcaaatgtgtattttgtccatagatggacctgtttgggctgttcaactagatcttgtgcaacattaggagtgtaagcgtatgtatacatttttgtgtacacacgtctggatgtacactgtaggttttcaactcctgttatacacattgttagtcttatgtttagttaggcaccataattacaaagtaatacaagtcatttgtcttactgtagttaaataaacaaaaaatacctgctagaaactaagtgaatgagtttctcatgaagctaaatgaatgaatttgatatctggaaatgtttcagagtggaagaatattagaatcttctctgatctgctccatctgtctctagtacagtggcctctacatgtgtgcacagcagctctggtcttagtgtctagctattactatttggtagatccatagatgggggggaaataaggagtcaggccagcaggttcaacttcttatttctcagtagcttcctataatgattccacctctaatgaggtgaattactactgcatgaaaaaggagaaaaaagggttttggccatcttagctaataaatcacattgactgcctggctgatcagatcaattgtgcataaatcagtgctttaaagagtcttaaaataagattctaccaagaccagtcgatccacaggcttgtgtaacggcaggtctcttgcccatagcaaactgtgcaggagttcacagtattgagacagttacatgtggccaaatgttgaaatgaatgtttcacatctcagaggcatggctctggtgtgtaaagtagttagttgtgactgtcaatggaagtattttcatctcctccagttcacacttgttacttaaggtagcaagaaaatttaattctgaatacatacacaaaactcagttttttaaagcgttagcaacaagtgtaatttttaggaaatgtttcccacaaaaatatcattatgttatttcaaaagaaattgtcattaatatccaagggaagtattttattatcacaatatctctagattttagattaactaatgtatagacaccgtagggtcataagaagagtcaggaaatttgattttaggttccaagtatgtgaattgcctgggtgagtgatgtcggatagtgggaataatggagataacttttctccttatttcagaaggttgtgaagataggaatgcgattagttatttgaaactactgcagaaattgtaaggtgtgtttcaagaattgtcatctgggccaggtgaggtagctcacacctgtaatcccagcattttgggaggccaaggtgggaggatcacttgagcatgggggttccagaccatcctgggcaacatagtgagaacccccccatctgtacaaaaaaattttttttaattagccaggctacttgggaggctgagacaggaggattacttgagccttggaggtcgaggctctgcagtgagctgtgataatgccactgcactacagtctgggtgacagagtgagactgtgtttccaaaaaaaaaaactgaaaaagttgttttctgtttagaattcccaactgaatttttaaaactctcttaccagaagagcttacaaagcacgaagaaaaatctatttttgttcttgctatcacaatttgctcttctttctaaagaaataccaattaaactataacaatctaaaggaagttgtgaattctgaaaaattacaaagtccttatatacatataacgtttattaaaattgtattaacactaactttcaaagaaaatttgaatgacagattaacatggttaaatttttgagaagcaagataagacaaacatagtcatagcatatgtaaaaaaataccatttttttggggggggataatggcttcagtatctatggtaactgtcatgcaactctatgaaaacaggagattctatagaaaattaaagcgggtattattgaatctctgatttctttttaagtaggccagagcattctatgatggctaagtctccagaattttcttaaactaaatacaaaatttataattattctgtaccaagcgtctcccagcacagtgattttgagagatatgaccaagcatctcaagatcccctaaatgattattttctgtagtctcccgttttgaaaataaatttgagctaggcattcaaccatttagcaaaaacttggtgcctgtccaatattttgtgaacacatcaatataatattacctatatccgaatactattgttcttcctttgtcagtagattgattgcagtgccttatgttaatacaccttgtttctcccttattatattgtgaaatttagtaagttgttaaaatcagatctaattgattttctccatggcatttggctacaaaagcatctcatatccaaaattcaccacaggagaagaaatccaggtggattcttttgtggcattttcacttgtgtattaaaaattgtgaaatatttttcatcactgttaacattttaaaatgtagctatatagctacttgctgatagaagatgatacggcgatttttcaaagtcataaatagactttataacttgaatgaattcagtttctggtaactaacatttacttccctgggattattgtggtgtatagttttgtatctatttgtgctaaaaccctcagatactttctagcacatagtaggcacccattataaatgcaatagacttataagaattttgtttgcatattattgaattacttgcaaatgctcttatgaaattcataattatggggcattttgattatgaccaataaattaaaataggaatgcaaatacatatgttttagatttttatatagaaataaaaacaaacaaatgaaaatatatgtaacactagttcttaggtatattacaagatgtctaattcctggatgcttcccatatgctaatggtagtttaagcataaacatatagacttcatatatgtatatactcatatgattttatagggccgaggttttgtctttacctttattattattaattaaggtttgtctatcagattagttatgaaaggtcaccaaatgcataatttttgaagtatctaaacatttaaattgagtggtcagaccaaaaataagagtatatgtattagcagtttgataattacatgctactatttttagtgtttagtgtttgatagggattatattaaatattttaagtacgtggtcaccttcactcccagtaacagctagcagaaataggttctaactattagtttcaaagatgagggcactaaagatcagagcagttagtttacttgcttaaggtttgacagctagtacctgacaagtagaggtaatagaacccaagaaatctcattctgaaaattttatttcctattatattgtcctattcaaatagtacttaaccaaagactatctatctatctacctacctacctatggaagagtctggccttgtcgctcaggccgagtgaggtggcgccatctcggctcactgcaagatccgcctccggggttcaagtgattctcgggcctcagcctcctgagtaggtgtgtgtcaccacgacgggcttatttttgtatttttagtagagacggggtttcaccgtgttggccaggctgcgctccgaactcccaacctcaagtgatccacccgcctcagcttcccaaagtgctggcattacaggcgtgagccaccacgcccggccgatttgacaaatcaacttttatttatttacttttcgttagtctaaatctttgagaggtacagcatcacatggattctgtgtccagtggccttagcaggaagattgcttcggaatttggcatgaaccatgccgctgtttccgtgcgccggagtgaaccttccccagataactctggatttgtttggtttgccgccaggagtcagtgtgctgttctcgctttgtgtacataagcgcatctcttgcccaaatacaattcagtttcttcttgggcataaacaccgtcaattttgagaagaatgagctccctttggttctggagacccactccgcttataactagcaaaaaaaaatggccttcgaccacagccttccagacgtattttcttttagaagtcctgttcccagcaggccccataggctccaagacggcgggaaaagactgaaaaatgttaacgagttcgttatcatcatagggactcttatcacacaacaagcagtaccgataaggtcataatttgcttataagataaaatttaaaattgtagtgttaatttattaatctaatttatatcttcagatagtggtcctcagtggggagaaagtaatacataaggatactggattatggtctattataattccagtcctttcttgacaaattctagttcactctccatacttatttcacaattccatctcgttaatactgtcagagtaagctattttgattatggcttgtaaagcctactgtaggcagtttgtaataaagtttctttccagtttttaaactgatatgtaactatggcaagtttgggagtaggaacttttcctttacatgctgtaatctagaatcagcttcatcatcccatgtcaatgacccacttgtataagttcttccatccagttagtttgccattttttgatgtctttagattattattatttatttttcacagcaaaaaagtattatagtttggtatttggcatcctcatattccatatgaataacttgtttttcatattggcacactttcatgatgtgcaaattccttagtggggtagttcttaactttgcccatctgtgttcattcactttatttataataacatttttagaaaattgacatataacaattgcacatatttatgggatacataatgatgttgtgatacatgtgatcagatcagggtaattaccatatccatcatctcaaacatttatcatttcttggtgttgggaacactaaataatcttccttctagctatttgaacctatatcacatattattaactataggtaccctacagtgctatagaacactagaattgactcctcttatttagctgtaattttgtgttgtttaacaaatctcttcctcttccctcctttctcctgcccttcccagcctttagtatccactgttctactttttacttctgtgacatcaactttttgaagcttccacatgaatgagaacaagtagtgtttaactttctttttctgtcttaactacatttaacataatgtactccagttctatccatgttgccttgaatgagaggatttcattcttttttatggctgaatattgttccacattttctttaatcaagtgtgggtagtaacagtttttcaccaggttagttattatataggggaagtgatggaagtcttattaaggtaaggagttaacggtggtatagctaaattttgtgagtttttctgttaatgtttagtgtctcatcaatgtcatgtcaaagtcttgaatcacaaaagatcatgtataaatgatatattgcataaatcaaaaacaaaaaaagtattatttcttagacatttaggagaggaggtatagtatttctataaaatatttagcaatgcctcccctctttttaatggtggtttgttgaattacatcaactgtatgttgaaaaagtgggctgcatcctgatgtttctgatgttttttgcttctactcatgattgaacctattggtggatgactaaatgcatggattcattgccaacccctgccttgcttgcctgtccaggattacctgtactatttatgcacgaccttatgtcatttcaaactaacagtattttgtgaaactaagtaaattcatggaaacctctgtagttgagccttaaaaccataattttaagcataccagaatcactcagttctaaattctattaatggatgctcttggaagtctcaaatctttactttttcttttgtaacttttagtgctaagattcaggtgaggggcccttctgtgggaaaataaggatatgctgaaggaagtagtgccattttcatttcccctagagacttctgtcttaatgggctggctttgtcctttttctcctatgcagtttgattcttcgcatttatgacttccctagggcaataatttgcaatgctttgcaaatagtatgctcatttaaatattgataaggaataaatgttcctagtttaagcaatgggcaaagctgcctgtaacctgcaccataaacatatcctcttaaatgaccctgatacaatgcatggttggtgtgctttcctttggttcaatgtacaacgaagagtgttgcacttggggcttggtatataatatatttgaagggaactttcagcctcccttgtatgtgtttaataaacaagaaaagcttcttgaagaattgtaaacttcagtctagtgtggaaaatttggaacatagagtactatcatttttcaaaatccaatagaatcctagaagcatcagtactatgctttaaataacattcatgattgggcacagtggctcacacctgtaatcccagcattttgagaggttgagctgggcagactgtttgagccctggagttcaagaccagtctgagcaacatggtgaagccgtgtttctataaaatacaaaaaaattagccaggcatggtggcatgtacctgtggtcccagctactagagaggctgaggggagaggattggttgaccccagaggttgaggttgtggtgagccatgattgtgacactgcactccaacctgggtgacagggtaagaccctgtctcaaatgaataaatacataaataacattcagtacatttaaaaataacttaaaaagtgtaataggatagtttgtgactcaaaggataaatgcttgagtggatggataccccattctccataatgtgctttttacacattgcatgcttgtatcaaaacatgtaacgtatacacctactacatacccataaaaattaaaaattaaaaaaataaaaataacattcagataatgcaggatagcaaaaaagaagccatacacatttttcatagtgcagtagtttcaatatttaaatgatagaagtgtgtctgttccataaattataaaatgttattgaaaatgaagattctctttaaacaaatcatgcctcatctgagcattcaccttgttagccagtgctctaacaagacacccaattgacaagtcagaagaatagatatccttggattgtgaaatcattttcagcctattgttaaccttactgagtaaattgtaaggggaaatattttagtattttaaaatttaactttgagtaataggtgagtatttaaatatcttctttttttttttcttctaacctccaccagcaattccccataatcctttaccatcttatttccaactctccttggaattcatgccattcttttctctacttgtcacattactctgctatcagagtcctttataaatatctttttaacctttttaatcagactgggtcatactctgtcacccagactgaagtgcagtggtctgatcacagttcattgcagtctcaacttctggggctcaggtgatcctcccacctcagccttctgagtagctgggactgcagatgtacaccaccatgccttgctaatttttttttttttttaatagaaatggggtttttgccattttgcccaggctggtcttgaacttctgggctcaagcaatccacccactttggcttcccagtgctgggattacaggtgtgagccaccacgcccgaccataaaatttgcactataaagcgttttctccaattctgctatcagtattattttttgttcacttaccttatgccaagcactaattggaatgcatttcttatctcacttaatcctcatagcagtcttatctccattttatagaggaagatattgaattacagagaagttaaataaattgcccaaggaaacaggtactaaatgagttatctgaggctttctgattccaaattctacactctttagtacactatacttgcagcctaaaatgagttgtataacccatttgagcttcagttttctcatttgtcagtgagggagcctaatgcctaaccagcaagatgaaaatttggggaaaggaggttgaactatgaaaattatgaattatgaattatgagatggcatttgtaaactatgtagaagttagtaggaattcaataaatgccttttgtcattttcatttttccagttttccaggtcatacctaggaaataagagtcaagaattaggacttatagtagaaaagtcataatgaccaacttactggcagcagctcttcagtgaccttagaaagtgcagattgtttttccccatttctaggcagtttggtcctccttggtagtaatatttgtttatctctagtgtcacaaacagctgtgcttgtttgagtgggacaaccaccatcaagaaaagactcaaggctggcagctgtaactaaatttaattttcacctacatttcacagtttatttatggtgagaagtgtttctatgcaagcattctttcagtgaaccaagaaaaatagtcatatccaggctctgacaaagaacttaaactttgggattttgttagaggtaaaattaaataaggaatttattccttattagaaaataggtagtatccattaatcaacctcttgccacctcctccctccccgctctcccttccctgtgtgcaattattatgtcaattaaaaataacaataaaagcaaaaaaaaagagaaaagacataattattttttaaagttctcttttgagttgcctcacagcacatatacgtattaaattttatattaatgctgttagaaaccctgggaagaaaatattgcatcagatgaaaggcaggtttagaagatagcaaataaagtggtttaatatttataaactttttagagttgaaatcttatgatttcatggcatccacatattttaggtttcagaaaatatacagctgccaggaaaatgaatatcctcttcatgaaggttaccctatttaggcttcttctaaaacatacagtaaaatactccttgggctggtaaaacaactgtatcatcataatctagatagaggctaagaactttttgtgtttcccatctcaactttgtacatgttctttaatgtttgtaagacggaaagaaaagtgataaactcttcatccaagcccatacatcacatccatcttggaaatctaagcttaaagacatgaatataaaaaaattgaaatcaaatttatctgctcagatattgatgtggtcattagaagttctttttacatactttactgccttgctctatttttattttatcacttctcttattcattttgcaattttcgttattctttatcttaactttgtagcaatggcaaaggatacatctacattaatgaatttaaagcttctgaaatgaaagcaaaataagcagacataaatatgcaaaggcctagaatgagaatgtgaaaaaaaatgttatttttcatggattgtaaattggcctggctggagattaggatatatctattaatcggggttgtgagattgctcttgaaatataggaaccggccagctcaagaagggccctctgtgatataattaaggaatttgaactttatattgtagataacaataaatcactgggaaattttttttccattggaagatttttaattaggggaatgatatgattgaatttgtgttttggatagataacacaaattgaaggcgttttaaaccagagattttaataatcagttttaaataattaaggctgtagacccagcgtggtggctcatgcctgtaatcccagcactttgggaggctgaggtggacagatcacttgaggccaggagtttgagaccagcctagccaacacagtgaaaccccatctctactaaaaatagaaaaacttagctgggtgtggtggtgcgcacctgtaattccagctacttgggaggccaaagcatgagaattgcttgaaccgaggaggtggaggttgcagtgagccaagatcgtgctactgcactccagtctgggtgacagagtgagactttgtctcaaaaaaataaaaataaataaataaatacggctttagtggggatatagggaggaaaacataaaagaaaaagtaaactaaaatggaaagacttgaaagagctgtgtggggaaagagaagtaagttgacattaactctctagtttttgctgaacagtattgtaagtctaagatcatgaggaggagaaggtttagtgaacataaataatccattttgaagactttgagttagatgcttgtgaattatccaggggatgttagaaacatatatttggaactcaagggaaaagttagggcagaagccctagattttggtgtgaactccttttttaattttatttttatttttatttatttattttgagacggagtctcactctgttgcccaggctggagtgcagtggcatgatctctgctcactacaagctccacctcctgagttcacaccattctcctgcctcaacctcccgagtagctgggactacaggcgcccgccaccacacctggctaattttttgtatttttagtagatacggggtttcaccgtattagccaggatgatcttgatctcctgacctcattatccacccgccttggcctcccaaagtgctgggattacaggtgtgagccaccgtgagttttaaccgtaaaataatgaatgaggtttttagatggatttcaaagttactgtatgaactgacattttaataatttctttatgatattaaaagcactgattttttctctctgtcttctggattcaagtaactttgaaaaccacatattaacttttaaaagaaaaaaagcattcttaataattctcagaggtcaaatattatttttccattatgaattattcatagttaaatggaagtcaaacatagagacctgcagagagcaagtctttctgtgctgctgagtcatgattgtgactcgaagaaatacctttattgtgtttgattctgagcttgtgataataactagtgtcaaaagatgggaacattctgtaccggaatttgaaaaataccactgaataaaaatgaaagctctgttaacagaattcaccttaaactgtaagctgaccttttaatagaaaagctgctgcaaaccacaaaggtaggctccacggaatgcagccgcagattgagtttgcagagtgtgctggctgattcaatccaatgctaatgggaggacaagtgcaaaggatagtgcctttaaaataaacacagacaattaggaacaacaaatgaaaatcatgataccattgagaaagtgagaggtcatgatccggtgcaagtcattctcaactaacaaactaaaattgcttcaaaattgctttttaactcaactctctcacaccagatggcttataaacaatcatgcacattgttttgggtgatacgattgtttcaagggattgataccagaatttggtttcactatatctttatcttaacaattctatgtagtatttttaactcttagagtctgtatgtaataaaaattcttttcttcaccaaattggtgagtttgtatgtgccaaaatatttttgttaaataagagaacacacttataatcaaaaccaatgtacaaagctatgacagttacatctactggagaataatgtgttgttctcactgaactcctttttgctaaaacttctccatttatgaaattcgttactattgtgcagcatctatatattaaacaatgaactccacatctgcaaactttaaatcatctattaactttaaaacatctattagcaaaaattgtcccactgggggcaataggaatcgagtctaccagttttgttcttagtttttgagtttatatttctcttacacctcttcactaataattaaatgcagtatcaacatggttttgaagtttaagctatccaagccatttgtaggttggcacttctttttttttttttttccctcccccctcccccctccccaccacagtccccagagtgtgatattccccttcctgtgtccatgtgatctcattgttcaattcccacctatgagtgagaatatgcggtgtttggttttttgttcttgcgatagtttactgagaatgatggtttccaatttcatccatgtccctacaaaggacatgaactcatcattttttatggctgcatagtattccatggtgtatatgtgccacattttcttaatccagtctatcattgttggacatttgggttgctattgtgaataatgccgcaataaacatacgtgtgcatgtgtgtctttatagcagcatgatttatagtcatttgggtatatacccagtaatgggattcttagacctttcatactcacctatctgttttgcctgccatcattccttcgctttaataaggtcatttctgacctggttgaaaaggaatataagccgtgttaattttcagggtttaccaatgttgactatctataccttctacctacagtggagaagcggtgataaataggagtaacagttacccaagtttccagctcaggtgtctgttacactctcactacttcagcagagtgttaaaaaaaacccatattttagaaatgctactttacaattgaataaataatactattacagaatatgtataaatataagatacttttatctaccattgaagttggtgaatccaacagtcatttcatagtaggtctacccaaaagctttcaaggaaataaatgcttttatatattatcatacgtgtaaaactactccatgcatagatctagcttaaaataaattccaaatgaggaagtatatttacttaatattaccttaaatttgccttattatttaaggtaaatattaccttaaaaaatgagaataatgcattttcatttcccccttaatctttcgttttcacattgttactctctcctgttactactagaattaagaggcctcagaattgtgtgtgtgtatgtgtgtgtgtgtgtataaagtgatgaaaactacattttatctactcaatgcatatttgttatgcacctaatatatgacaggcatttcttctaggtgttttggataaaaatccctaccctcatagggcttcaattctagcactcatggttaggggtggagagggaggcaataaagaattaacataatcaatgagcaaattacgttaaaaataggacagagtgagagagcttggggtatgaagagtgggataggtgaaattttaaataaagtggtcagaatgaggcctacctcactgagaaaatgacatttgagtcaatatttgaaggcgatatgaagagctcaaaggcattttaacagagcttatttttctttgcattttctctcgctttggtttctagcttagtagaggagggaaataggaagtatggatcagagttaatgctataaagctttgcattatctacaagtaggaaaatattacattttttttcctgcaattctaagggacaagaacaaactatgctgcagataaaaactaggttttaagatcttttctctgccacttgctggcttggggattgtaggcacgttttttaaagtctgtgagtcttagcttactcgtctaaaagtggaataatcttgggtgacattaaatgaaattatgcatattaagcacttagcacagtgagagacataataaccactcaataaacattgactattaatttttatttaatattttagtctttttttttggaaaatgtagaattcttcatagcctaccaaatgggactttctctctaatgagaaatatctagaatactctataatggtaccttttttctcaagatggtgaaaggaataaaatgtgtgattcagaattctttggctagatttattattaggcaattattgagcaagataaggtaagactattaccagttcctgaatctgagtacctatgataaactgtgttcaaccgttctgcttttaattggagtattagtgaactattttattttttcaagttggtaaatagcctgcagtgattaccattcacttggttttgtattaagaggtataaatatcttaaatacaatagaaaatttccagatctctgcgattttatgagatagtagaagatttgtaggagaatgttagaaaatgaatctgtataaactttaatgtaaacttctttaaagtgatttttttgttgttgtttgctagaagattgactttcatcacttctttcattccttcagagtggcatagataaggtaaccataaaattaattagccgaactaggacactcttgagaataaacagaaacaatattactaattctgttgggacaataggtataaactaggactatcatgggcaaatggggatatatacagtcatggaccaatagggcctctttttttcaccaatacataaaggatcaatcaccagtagcttagagatgagcagtttttaaaaagtctgagataatttttacctctgggataattttaggagacaagacaaaattaccttacttggaggcaggccaagagaacaggattcttacccttgttgttttattttcattttaataagcattacagagtttctcatgaatgacagtgattgcaaaattgattgaaagctcattttaattcagacttctccatacaatattttttctttagtttacttcttccagtccttttgctctgtttcttgtatttgtatacatctcagtaaacaagcctttatttgccttggcaagctctaggtattttattcattaagtgaacaggccggtttcttttctaacagactggtggttaccatttcaaacagctccctttggtctattttggtcttattgtgactctctgagccaacatttccaaagttttcaccagcaaatatgtaggaagaacaatgaattttggtggggagttgaggagaaatgggaaaaattttggcaagcttgcttttctgtcttcttatctgtttggcaaattcctgggctgagcctcaacactaaatttctctccctgcacatggacaaacactgagagaaagacaaatgtgggaaaagggagaagtagaaaaagcagaggtaaaaatgcaatgcctgggattttcagaatgccgacaaatatgtgggtatctattcagcttccaaaaattatgcatcttctctgattcccaatgcaaaaatgtgcacatgatttctttgatctcaaatgggtattattcccaatatcgtattaaagtcccaatttttgaaatgggaaaacgaaaccaatttaagtagtgcatcagatgccacttaaatgttaaggtgggtccaccctttataaaatgagagaattggtcaaacataggctacagcggggtgcggcgaggcaacagagccgttaaaaagcgtgtggaattctatgctgaattcttcaagttctgacttcattcatgggactactttcttttatatagatagtgattccagaaataatgtcccataatagtatttcagaggtgctcttgggcacaatagctctagatagtggagattaggtagatatttggggtcttacttcacgggcgtgttatatgagaacctttgcatcatccattttgcttctaatcacgttttccatttctggtgtgtgcttccctcataaccctgtttttatatcataacgtttgctgtatcagcacccattctctttccactgctcagttttaaatagcttcattatgaaaaatatagtacttaaaaacatggcacaaatgtgtattacttcagcacaagataaagagattactgagaagtgcactgactgctgaagtaactttatcctaagggatatttcgctactttaattgattttttctgtccattttattaagagtccttggagaaggtaaatggtaggttacctcctggaaacaaaggaacatttgacgtatttgttatgactaccagtgtgtccatacttttgtaaagttaaacatttttttcatcatcatttcaaaattacttatactgatgaataaaaagatgaggatcagttagttccaaccctagctagggtctacttgaattttaaatatcttgtgctatttcagagaattaatctacgttttacttatttatgctagttaataaattgtagttttgacaaaactagggattacaatttattgtatcaattactattaaaacattttaagacacttttttattttagcttcacaaagccatcctaggcaaaactgcatgacactgtcgaaggtctttaagtggcgtctctcactgctcttagttataaaagtttagatgaatgaatactcttataaatcaaaaaagcttataaagtacccaggctgtgtcaccaaatcccatagttggtgtgggctctgaattgtgatattcatacaagttcaggaatagttaagttccaacattatcactcccacctgaaattaggatactgtaaaaaaaattatgatgctacacaatatgtttataaatctctgttttagtctatcaacatcgttgttttccatcattctctccacttatacttcaagtagtaatgtgtacaaattaggttaacggatgctttcaaacaaaatttagtttaaatttgtttattctctttataaacaaagataaacaaaataaaaaggatgaaactatgagactttcatgagcctctttaaataacctagctctgtatctgggtgaaagtgacctacatccactggaccatagaacccatccctcagtgggtcctggggcaggtatttctcactgagcatccctaatactcctagcccaggtgctacagatgaatctgatgcactaggattcttttacatcaatgttggctctctcttacaaaatgttttctcttcttgtagctttcaaaacgttctattcacatagatctcagaagattctgaagggagcgcaacttccctgttagcgtctttctgaagctatatggatttcattaaaaataaaaataaaaataaaaaagtagggagtggaattcagattgttttacttaattgtcttctctcaaaaaagaggaaaaatagagataaattaattactcctctttttagaatagtaggagttatctatatataaaaacaaagcaatttaatgttggcttggtcatttaacttaaatacaattgaaatgagaataaacaaaatgaaacaaactgctttaattgaacctaggtggctggatatcatgccttctcttacatttttacatttccagtagtagaagatgtcttattttgagaagctaaattgatcaaggtctatcatttgaacaagttcctcttctataataacaaaaaaaatttaggtagttctaactctagctatgatctacttgatttttaagtataattttctatttgggaatattcaacatcagttttagtcatctacagccattttttgacaagaatggagattgcaacttattttatgaaaatttactattaaaacattttcttagtttaactttttctgctttttacattaaaaacaaaaatcgaaacacttatttttttatgtttatgcaggccccatgcattttagctaatacttacttttgacaatatctaacatgttggagtcaaattattttgctattggggagaacaatactctcatttttaccatgaattgttgctttattgtttgtattccatggcaatgttatacattttgaagaaataaatattctcttcctttgtcaataagagatccacttcatttattcccatttagttgtcttctctttgtcaggatttagactaacgagaaaatcttagaaagatcctttactgtctaaacaccaagcacgcaaatgcttctcaatagaaataacacaagaaatgcgttcaaagacaatacctagcctgagaaattcttgtgtgctgacagctctccaacagtgttgtcacagcaggaagacatcagttgaagaaacagatagtgacctcaaaaaaaagtctggtcagcagtgtggacagggtttcacaagattataaatcaccccagggtcgctctgttcccaccataaagagagcatggtcgttttattgtaatctaataagagatgggagcaaaggacagctccagtgtgtgtttgcaaaaaaaattcttgattacagtttcaaaactatacagtttccctgctattgaagtgcagattataggggttaaggccatgttaggattggattacctttttatagctgtatgttatccctcggttcatgaatcagaaagtacttaaattaaactgaacatttgggagcaatcccagtatgtagcatggtggtagaaaattaatcatgattttgtgatagattattaagctgttcatttgaagggggtctttcatagaatcagaagattaactctctggtgggtatatagtagtacagaaaaaagcccaccctatatatcacaagttatgttaggactcattttagaggggaatgatttaatgaaagacaacatgcatttatataaaaatgtgtatgagatcaaaacatcactagcagattttcagtttctcggaccttactatttttttttaacttgtatttattagtttctatgtttatttttatataatactatttaacttaaaccatgtggttactaaatattttaaatggggcattttaacatgagaaaaactaacaattccatattcgaaatatttaggaataaaaaaattactccagttagattaagagttactgaggaaatagtagccacaattttgaaggaaaactctaaatgtgatgacattttaaaatagcacatgcctcttcatttgccctagaagcacttcatgtggtggcgaaaaggctttaactttattcagtcattttatcgtttgtacttaagcttcttcaacactatttgatctatatacatttctgggaccataatcaggcatcctaccatttaactagattttattccctaacatattgcctttgctttgtcagtttgttcctctggaaccatgctgacatctcaagataagtcctatcagtcttgggctattgactgaatttgattgtgaagaagccatcacttagagtagagagaaacagggtgaggtgttattgctaagaatatactttatgttatggttctaaaatccaaaagtaaataagatgggattggcagctcttccttttttattaggcataagatagattttgagagctctttttgtcttgtcttcttttcccttcaggagtcacaaacctggtagttttgctctcatttactttcttgagcagagatgaacgtgaaagggaattctggctctcgaaggatattagactggtcggttaaacatagtgggtctttaattcatctcagtttattttccacttgtcaatttctctttgtctcttcctcatttatatatgcttaagtaggtgagtagacagatttcactgtttctctttgccttagactttctctagtgctgctaaaagcactacgacaggaactggaaactggaaatgatcaatatccagacaagttctattattttttgaatatagaaaacatttgtgacttctacaacttccgttggctgaaagaacaaaagctctgggtgtcactgcaacttcaagctgcaaatgaccagaacaatagtactcaatttcttattctaatttacgctaacttgattctgtttcctattggctatcataagaattttgcctatataaataagataaatttgattgcaacctctcagatattttctgaatctgttagtgttgtaggtgtgtttcgtattcttaacttttttactacttatgttagtaaaagataaatgaatatatctacttaaaatatttggtgattttaagaaagtaagctattctgatttcctataagtagaaaacatatcattgatcatttatagtggaactactcctctatttttacactctccctaggtaaagcatacaaattaattcacagcaaccaccatctaacactggaatttctcctaaggctaagacttgtgcacaaccatctgttttacatatgcatttttttcttggtaatctttattactagatggtctcaaatagaaagtacataagtgcaaatgccaacatgtatttttgttagtggtgctgaatagactggttaaggtagacaaacaaatgtacttactttgatttatcacttctgacattagcatgtaccatactgctctccgggaagcaaaatggttgcacctgaggacagtgatataaacactactttgattatttgaaacaaaccattaggctttgatgaaagaactattaccatggtggatcctttgcaggaagagaatgcttggagataatggatgagcagcctaaaattacttgtttagaatttaaagaagtcaaagcctaggtttgaggaggaaataagtatataaagcaaatttaattttgtataaatttatacagttgaatttttattcccagtacgtacttagttgcagtgactttcttgttttagatgaaatttatccaaattagacaaacttattctaaagtcaaattaattgtgtttgaaaattaagtccaaagtcattctattctatttttcaaaaataatttcctaagatcaggattttatttatttgcatctagaaactaccatatgttttgtcttacatttaaacacacacacaaaaccaagcccgatgatgacttcaatacatatttatcttatgtgatttgtagatggagattatacttggtcaaagcatgtatataaaatagaaccacaaactattaaaacttccccagtctaaagaaattttatttaaaaggtacaatttaaactaaaatatttaagtttttgaagaggttaatgcttttaactttcttacgttagtacataaatgtgaactgaatgtcagattagacaactttactcagtattgaaaagaaaactactggtcttcagataacaggatttaagtgaatttttgtgggaggggagtgaggaggaagaaagtagaaagggggtttagtgagtacaagcatggcaacagtataagcataaggcaacagccgtagtgatgtctggataaggaacaccagaaatgaacctgaaagactgggggccttagagaccagagaagccaggatggaagtgaggaagagtgggttactcaaagatgggaaccagcaggctaaaaggaaagatcaaaccacagaggcaccatgtaatgaagacaaactcagggtttttcttaactttgccttgagcctaccctaaagtctgtgaaaaacaaagaacattttaaatagtctgtcttattaaaatgatttgctttagagatggcacattatgcttacgctaatgtttcatggttgaatacatgcttttgtgctacaaaccgtggtttatagtttagaaaatataaaagttgaaaaagatgtttaagaacattattttttattaccctactttatatttggatgtcgatggcacgggtgtaactggcttaattcaccaatgaagaaatgtaggtttcacagaggttaaagaactcacttaaggtcaggaacagtaagctgtggagagagaagcagacacagatcttatcactctgtcccgagcctttccgttaccctgtaacgcagcttaacacttttgaaagattgtggtttcctgatcctcagagttcaagtcttcctcagaagagtttagcacagaaaacagtgcaaaaaataaatgtccctatgtgatttcattttcagtatatttcaagctaatttatatataaatcttgttcacagaggagcggaaaggtggcttctgtttagtagcattaaaggcaatcaatttgtgttgcagatattgacacagcacctgaatttacatagctctggtgcaggacctcttctttacttagttaatcaaaagctatcagaagaattataaatttacagataacctcaggtaaataggaaatgattttatgtgattaatagcactattctttgttattgtccactacacaatgcagttgctctgaaattcagtcgctggttttcaaaaaaggagcccaggcgcttgccttaatgaaggatttgctatttaatctttgccttaaaattgtgaatataggaaatcctaatcagctatatatttatgactttttctcctattcttttctcacttcttcaactggcatgcacagtctgaagttttattattagtgacataaattaaattgtaaatgtttaaagggcactgtcacattgaaggtgaatccaatgtttttataaacttaataaggagcgttctatcaatgaccttattcttctgtagtacgttgacaatcttttgatgtagtcctcactcccttgttctcagctcattctctgggtctgctggcgcttctgctattatggaatcatttgctggttgaatgaatgttttctcaagtttggaacttactgtgcaacccaaagatgccttaccaattaggttgcacgtttattttgttttttgccatcttggcattgaaggctatattcttcaaattaatgaaggccatgttgtaataattagttttaagtttctgcagccaatacgttatataacaggaggtgatctagttcacggagttgtaagtcagtaggttggcgattcagccccgcctgcatccctggaaacaatgattgtaatattgccttcttagatattggtaaggtggaactagtaagctgtgtttagaggcataaaaatggatttgcatgctggagtttggactctaaggcagcaaagtccagctttttctcttctactctatttctttattttccatcaaaaatcatttcacatttagattatcaaagtgagtctagaatgttagaatccactatcaagataataataatactcccactctcctggatgttcttaatcctcatcctagtggaatttgaatgtcttaggaaaatcctgtacatacgtaattgtaaagctttcggaagactttggttcaggattgctgatgcttccctattccagctaatagtaaatgaagattcacgcaattaaccccagttgagcagtcaacagtttgtgagtactttcttggtcaggcactcttctggttgctgaagagaaaatggttaagaaagtggcaatttctgagtcctcaaggatctacttcggaatatacatatataaagatgtaagtgaaataaaatatattaaatgcccttttatatgtgtaggtatgcatatacatatataataggcatcattatatataattaatcatattttattttacttgtatctttatgtatacacaactacatgcccttatggcagcagaggtagtggtggcaaaacaaacctcagtgggatggcatggacaagtaggggaatgggagaagagacaggttatagatgttcctaggaatgccatctagaggaggaccaaagggagaaggtaccagctggccacgtgagaaatcatgatcacagccttgctcataagaaatggttttgtgtagcctggaaaactgcaaccattttgaggtagagtactgggagaaaattcttgaaaagtaggaaagacttagatcaaaggaagtttcttttatttgtttattgttgaactgatttaatttagaatcattaaaaagaaacctaaaattcagtgcttatcaaaatagcaatatgtcatacagaatcaggattaggaaaagaaatgataaagttggcaaatatgttttattttgatatgtatatactatatgcaacacaattttgttgctgtaaaatgtaacttttaatgggaagcagtcaaatggatatttgaatacacatttttaatttccagtttttaagatgcaaaatttggaatcaggattgatatgccaaaggcagtggactcagggtgtgaattctttccatctctttagctttacatgtgcatggatacagctgtttgcatggttgccagatgttagactaggggcttcaggaatatattccatgtattggctccttcccagaagcaaaatattatagattctaataatgttcttgaaatataaatacaagttgtctttatttttagacttttttaggtgtcaatcagaaacatattgaataaatatatgtctacctaaaacctggtacacaagtgttcatagcaccattattcataatagcccaaacaaaataacaagccaaatgtccatcagctgatgaatagataaataaaatgtggcgtatctatccaatgtgtattactcggtattaataagaaataaagtgctgatacatggtacaacatgggtgaaccttgaaaacattgcgctaagtgaaagaagccagccacaaaagaccacagctacatgattccatttgtagaaattgaccagaataggcaaaattactcacacctaaagtaatgattgcctaggtctagggattggggtggaaagtgacacttaataagtatgtggtttcttttaaggggaacaaacatattataaaattgaacttggtaatatatagccctgtaaatatactaacatcattgaattgcatactgtaaattagtgaatgtatgataggtgaattatttatcaataaatctgtgaaaaggaagtatattaaatagcttggataaaggagtgagttaaataatgcaaaattatcacctgtgcagtttattttttataaaattcttaagtaaaatatgaggactaaattagtaaatgaaagagaaaactaaatatgaagcacataagacatttaagagcatcttttttgttatttcgtttgaaatatgtttaaacctttaatccatcaattttggtatgtgtgaaaattaataaattaatagctctcttaccttccaagtcaatcagtgatgattttcccatttctttctcctgtgggggcctccttaagacttcattatttgggtcattctttgaatttaatggcatgtttttttccaattatgaaaataaattttaagcaacagtattaaaattcccatgtttatgaaatgtataaatagtaatatcctcagctttaaattgctcaagtcaatgattgtgtttggacagagcttccactttattgactttatgagaggaaaaaacagaaatattttaggacaaattcctccattgtgtaaactactccctgagagtagtaaggagtgagaataactcttttgatgaagtagtaattgaaataataccctggggacgagaaagagttattttccaaagcagaagaaatgatgtggagaattgtagctttagccaaaagaaaaactctagttgcagacctaggaaaaattaaatatcatcccttccctctctcactcattcattcatttatttttcattcattctgaacatactcattgagtccctgccatgtgctgggtgattattactcatgcatattactctggcaagaatgtttctttttcttacttatcatgtttatgtgacattcagcaattaatggggcattttttcagagtattagggaaagttcctctccatctcttccttaatttcagtctgtcaacttgtttaaggacatatgttgccttattttatttttttcattttctgagtacttatttgatgttgaatataactgagtccctcctgactcatcttttaaataataataatagcaataataatataaaatgttcatagttattacgtagatcaaatttagtgattaatgtgtagagtttaaatcttggctcattgtagacagcaagtgacaactctgttgaagagtctcaacgtaggtaacacatattctatattattttttaaattgaatataatataattgtattagttcttttattacatggcatgtggcaagaggtttgaagaattgtgaactattccatatagaaaaacattagtaagctatttctccttgatatccagtaaattaacagaatttacataacaaaatttggcaagtgtttgatataatttctgataaatacttagccttgtattttgagtgggggaagtgtatttcaataattatgcattatttttgcagatagtaaaacgtcaagacaaatagccttcttttgtttactgatttgaaatactttcatatgatcatttatcatttaacagtgcttatcttataacgaggttgtcattgaaataattttggtttgttttttttcaactttatgataacttggcttgaaatgccttttcaaacaatcaagaaacagataaattttatctacaattgctttcttttagccttatgtttaatgctacctttggctatctgtgatatatgctaaatgactttctcgcctgttccatattttagatacaggtttaacatccagaagtacttcattatatgatgatttggattgtaataccagaaataaaaggaaatgtatttctcagtgcatcagtgaaaaagtttaaataagttaatcacttgtctttatgaggcctttcatttcatagctcgatagctctctaaagttccattgtcattttttagtatcattatgtgcatgcatctagaaacaggaggtttagctaagagatgaaatccttttaatttccactctgaacacattgaccctttcctttgtcttaataatagaataactctgattgctggatatttttaacggaaacaaaagattgaataattttgctgtcttatctttacagcttgcaaaagggggcattttaatgaaagggttgcttttgtttattatgaataactatggaataggaaaaaataattttttgaatattttattttttaatttatgaacacagttaatcatactcatctttatagaaaataatgagtcagggcatgccaccgcttttgtgttggtgctgtgttattttacaggatatagtccctcaaaggtacattttctgttgaattttaatagctgtgaagccctaagttcaaatctatgtaaatacatttttctttattctttactaataatacgttattttcagattatgatttttttcattgtggagaactgttaaattattaataataaaagcgagagatgttttgtttcttgttttgtgtttctttagttctctccctctttcctttggtatcatataaggtcctagtgaactattagccacttgctccagcatggagattttgaaaaacccttacgttttaaccttccccttaaactatggtgtctaaagtgacaggttaatttcaaattcaggtttgattgagtatatgccactttttacatgctttccaaaactaaaatagagctgtctttagaaatttttgtattaggaaaattaacgctaatcgaggaaagtttgctttagttaattccctttccacattcattgcaacttttgggaaacatgcagtgtgttcaacataataacatacacgagatacacaagaatgatgagagcccagcagcaagtgcatctaaggaatgctcatcttgcacttttgcttaatttaagaaatgtattaggaaggaatctaagaaaataaagacatacttcattttacttttactatattaaaggtggcacaggtgttaatccatgtaatattttgcaagatcttattttgaacttttgtgagtatctctgttcactacaaatatagtggaaatcacatttccttttcaattatattattaacttatttaaaatgggatagtttaatacatgacactaaaagactcataagcacatttagaactagatttcattgaaattgtatgtgtgtgtgtggtttatgtggatgtatttatatataattttgctggtttcagtgtctttgtcttttcttttcttttttttgatggaatctcgctctgttgccaggctggagtgcagaggtgcgatctcggttcactgcaacctctgcctttcgggttcaagcaattctcctgcctcagcctcccgagtagctgggactacaggcacacaccgccacgcccagataatttttgtatttttagtagagacagggtttcaccatgttgtccaggatggtctcgatcttttgaccttgtgatccgcctgcctcagcttcccaaagtgctgggattgctggtttcagttttaaggaagaatgtgaagtagataatactgcagtcgtttaatagttatcagtagggaattattaaagagactgtggatatcttaaatgctttatgatgatggcatacaggagcaaaaatgaaaattgtatattgttttaacttaaaaaatagaactgtactctcatcatctaaatgcatagacctataaagaaaatatataactaatgtaggcattaggcattcctaacttataggtgtagaaattaaaaactgaatattttgaagaaaacagatgttgcctacattaaggggaaaattttaaatttaaaatcttagaatttaaatttaaatttaaaatcttagaatttaaatttaaatttaaaatcttagaatttaaatttaaatttaaatttaaaatcttagaataatcaagctgagaagggacctcaggatcgtgcactccacccaatttgcagatgagagaactgaggcacacaggagggactttgaaaacctaaaggagaggaaaactgtgtagtagttggatcatgggtggaagtggatagagtaagtcatttttcaaccctagtaaagcagaaaagaatattaacactaagtcagttaaaaggaactaagcaccatgtaagaggattcacctactaaaaccaatgttcacaaatgggagaagtaggcaagccctgttgaatgcggctatcattccagatacttcaatcaggagtctatagagtatacctcctaccatgtccacttatgaacttttccggttagtcctggctttctcatgctgcaaccactttgcagtacagctagctgtcttattggcctctgtttttgtctagagctctgctatttagataggtaaggttgtactttgggttttttgtttttgtttgagatatgattgagggtgtgatgaggtcataagaagagaattacgaaatatctttctccttcccattttgttctctgttttggttgttccagtctaatatacctctccttccacttttgtagaacagcttttagaagatgaatgacaatcctatcctttctccgtggaagtcatactaagaaagtggtttattacaaaagatttctaatgctctttctacatgaatgtggatttataactgtatgttgtttcttcttgtgattatttttattagacttacatttccaaaaatatatattaatattttaatttgacatataccgaattctgtttttttaactcatgatttaatgcattagtctaaagcaaagccatccaaagaatattatgtgaaacttaaaagttaaaacttcaaaacctctaatgcattccttagcacttggaatagattcaaacttcctaccatactctacaaagccctggtcaaggctttagatagactctgtggcatctttggaaattggaaaagtcatctcatgagcaatcacatctccttggttgcagaagggtgctgctactgtctttggatgcagaagaccatgcctgtccttgtttggatactaggataatggtatggtgatactaagataaggggctggacttccttgaaaccccttggcagacccagccaatctctcgggcagtgcagtagatgcactggactgtctggtatttctctttcttccatagaaactgtgccccttcatatcattctgtgattaatttcggcccctattctttttttttttttttttttttttcggtagaggcaggatctccctatgttgccgaagctggtctcaaactcctgggctcaagtgattctcccacttcggcctctcagagtagtgggattacaggagtgagccactgcacccaatacagtccttttctttaggtgccagttaaatgaaatggagccatttctggtccattctagctaatgtcatccacatcttctcccccgagtaccctttgtcacattgtgttatatttttgtttgagtccttgtcaatatctgaaattatcttacttggtttcttagttttaccttttcctcatttgtgcatgaattcttttgaacaaggactttgttttttcactagtggatacttagtgctaagaataagaattaatttctttgttagaaattaatgttccttgaatgatgaaacagagcctttacaccttcaatttgctctttttctgtcagtagtggagaatggaatgtgtacattcttattatattattgctggtggaaggaaacattggtagagacaaagtcatgacctctaatcctttcttacacccactagaaaaataccatgtgataccatgaccatgaaatagacttccagctacagactgtcaatcccagaccaggaccacataaaatgaaaggagagaggctccaatgacactctattaagttccatgctggatattttccatatgcccttccagatccacactgcgtctttgcccctcggctttgctctctgggagccagatttttatggactgccttcttggcctaccttaccctgtagcttctggatgtgttcattctatgcaaagtgccagctggatatcaggaggagagaagtaggggagagtgaggtcaggacatttaattctcttccttccttcctgctgccttaatgagcagtggcttcatccctcttccaaaatacacagttcttgcagggagactttcctatagcttcagctccatgttccaattgcagcaactggttgatctcctctcccttttaggcctcccacacctggcagccccaggatgccaccttctcttttattggtttacttcaattctgctgatactttagcgaatactccctacatcatctaactctctccagttaataacatctgaggggcttgtgttctctatagagaccttgatggattcaggtcccttcctgggagtttcatgattagcaaagatgtatttaggaaactagaatgagaatctaaactgaaaatgtgctttgggaacttgctatatattgatagacacagaatagcatccaagtcaaaactaagcttctttattgtccacactccaaaggagaatccactttcaactaatgcctgtatttactttacctttttgtttgtttgctaactggaagataaaaatatgtttagaaatttagtggtgaatattagctacgatccatgcctaacctggaggatggactgggcagtgcaagagtagagacaagatgaccaaataggaagtggcttccttgaagaggcaagttatgatggtgatttggacaagggtcacagccccggagatgataattaacaacctacagtgacttctcacaacaaccaaagtaaatccaaagtctttattgggactttcagggcttgcatggcctgtcctttactgtcttctccaaattcacctaccatcaagctgcatccgtaataacctattctctggtgttgcattcactgagctcatttgtctgttttttcattatgcaaatctcctcttacctcttcagagtgaccttcacagacaacctagtgaaagcacacttgcacccagcatactttctatcaggccaccctgttttccctaattatagcatatatttcttttattttcttgtttcttattgccaaacattgtagttccttgaaggcaggactccactggtctgttctagcactgttcaatagaaatattgtgtgagacataaatgtactttgaaaatggctgggtgcggtggctcacacctgtaatcccagcactttgggaggccgaggcaggtggatcacttgaggtcaggagtttgagaccagtctggccagcatggtgaaaccccatctctacaaaaatacaaaattggtggggcatcatggcgggtggctgtaatcccagctacttggtaggctgagggaggagaatcacttgaacctgggaggcagaggttgcagtgagccgagatcatgccagtgcactccagcctgggtgacagagcgagaccctgtctcaaaaaaaaaaaaaaaaaaaggaagaaagaaagaaagaaagaaaatatttagtagccacactaagaatgttaaaagaaacaggtgagattaattttaatcatatattttatttccttaataccttaaaaatattattatcttaagatgtagtcaatataaacaaatattcaatgagatgttttactttcttttccataggaaatctttgaagttcaatgtgtcatttacactgatagcatgtgccacccagacatttcaagaagtcacatttcaggtgctcactagctacatgtgactagctgttgcgacattgttgagtgcaggcctagttccctggtgtgtccctagaactaccaacacctagagaagggtttgccattttctaagagaacaataagtattcaataactaatacatcaactggcaggatcacattgtatcttgacatcttggtgtgtggagctgtaatgatggcaaagagaaccagagtgttgtacttgtaacagcactctacacaacttacagtcctgggagctggcatatgggccatccacaactctatgacttggacagttccactgatctgtgccatggtttgtccaatctgtggagtgataaggttgaactatttgatcttcaatgtcatttccagttctaacattatatatttcctttctcctttatatgtcttatttttaataattttgttttactttattcattcataatttttgtagacgtatgcttccatttctctttttaaaaaacttttattctaaattcaggggtacaagcgtaggtttcctacacaggtaaacttgtgtcatgggggtttgttgtacaggttatttcatcacccagtcatcaagcctaggacccattagttgttcttcctgatcctctacctcctcccaccctccacccactaaaagacctgagtgtgttgtttccctctatgtgtccatgtgttctcatcatttagctcccacttataagtgagaacatgtggtatttggttttcttttcctttgtgagtttgctaaggacaatggcctccatctccatccaggctcctgcaaaggacgtgatctgttcttttttatggctgcatagtattctatggtgtgtgtatatatatatgtgtgtatatatatatgtgtgtatatatatatacgtgtatatatatacacacatatgtgtgtatatatatatgtgtatatatatacacacatatatgtatataccacataccacattttctttatctagtatatcattgatggacatttaggttgattccatgtatttgctattgtgactagtgcagcactgaacacgcacatgcatgtgtctttataataggatgatttatatatattcccagtaatgggattgctgggtcaaatggtatatcttctcttttatttttcttcacatattacaatcttgcctttccccaagaagtagagtccaggcaaaaatgggataaagggtcacatgcccctgatctaacagcttctccttatatctgtcacatttagcaagatagtgccatttccaaagaaacccctgactgtgtttctgttgcaagtacattgtattatattttcctctttgattgtttagctgttttaaaaattttgttaattttaagacaatcttagttttggttaatctgagcttattttattttattttatttttttttggagacggagtctcgctctgtcgcccaggctggagtgcagtggcgcgatctcggctcactgcaagctccgcctcccgggttcatgccattctcctgcctcagcctcccgagtagctgggactacaggcgcccgctaccacgcccggctaattttttgtatttttagtagagacggggtttcaccgtgttagccaggatggtctcgatctcttgacctcgtgatccgcccgcctcggcctcccaaagtgctgggattacaggcgtgagccaccgcgcccggcctctgagcttattttaagacctgacaaaaatgttaaccttcttttatgttgacatagtctgtagttcaaggttatgcatgttgagcattcagtattatacctgtcacgtgaaattttgcttatatcatttattgagttttaattacttgggaaattgttaaactgttttcctaaaaaaggacttgaaaaatcactcaaatcagtgttccaaaaacagttcatatattccttatcactctactcttcaatacctttttcaattattttaaattctgaaatgcccagttgtctttctttttataaatggctttaaatgctattaccaccttgtttgaaaatgtgttatttcacagtctgcatctatatgtaagaaaaagtgcttcaccaagttaagaaacagtgttattttaggcaatggtaataatgaataacactgtgcttgacgcctggctctcgctcagctactccccccgcccccccccttttttaagaacaacatgaatactttcaaacccacacctagaaaacagtctgtggtggtttttacttgggcagctttgtttgctccaaggaatatttggacattagcataaaggttgcacatgttatacaaagtgtaattaaagaagctttgatccccaaatgtcaactagcttgctaagtgtcataacaaagtgtcaagcatctggtatacagttaatttgtagtcattaactccatattgttgatgtgacagtttgttagcaaagcaagcttgacggttgcattttgttcttgattgacacctacagacctccccacccgtttagtttacattcctgttgaggtttcctcaggttgcatttttactgcttaatttcccccaacttgttagttgaagtgctggcaaacttttaaaatcatatgctatgttagtacagaatttcaaactccttctctaaaatgttctaagtttgcaataatgctggaaatgaaaaaaagcttcatgatctttcttcagaatttaaagatttcttcaagtaatgtgacaacacatgcattatcctgatgcataattgtcacaaataacatatttataagacgacaattgctatggcaattaatctagtcaacagtaatttcttgtacagttccattaatatttccacttttcaaaggctcagaaaacagataactggatacttcatcatattcttaattgcattgatttaatccaaagagtccattacaatctaatttcagtcctttaatgctttaaaattttagttgtattaaattatctgcaacttgtttggtgccaggtttttaccactgttattaatagaatcccatttaaaaatgttttataagatacttgattttttaaaatattatctctttataccgatgttacaactatacatgcagcatattactttagtaaattatgtgaaggaagaattaagtatattttcacaaagtattctaagtaaatggatgtaaacaatttatacttatttaattcttataggttgggttggttatgtagctaagctaagaaacatgcataatttataaacttgtacaaaattgtggcagcaaccagaaagtttcattcactaaaggtcattcttaaaaactgcccatttggacaaaccagactttatagacaagcacaatgaaactgctgatggaaagtttttacgtttttatttggttaatctagcttactttctgccaacagataaggccagtcactacatttgttgacaggctcataatcaatttgtttgattacttacattaattttatcctttgccctcaaataattattccgagactacaacatcactgtggagacactccttggcttgagggcttaacgtcaccatttaagccatcattttgcccccaaattggcatttcacattggatagatatcttcatctctttaggctttgggtctcttgatccataaaatgaggtcactactaatgtcttattttttttctaactctaaaaattatgattttgcatgttactttacattattattgaaaaatggcaatccctttaaatattgatatgacatgcctcatagaacttgtgcttttgagtcttgtatatattcgcctaggtgaacactagtctatttattagatgacttgcatgagaactagtcaaatgagatcatattataggtttgttcttaaacctattctgtgctatgattgctttattttcccagttgtactgtctttgagctggaggaggagaatacatcctccctcagaatgaagaaaggcaacctcattagtggaaatataggtaggcatctgtggatggagttgataacgcaagtctagatgttagaggagttatgggaactgcagcttgagtctgaactcttgggtctgactcacctgcattgatcactagctcgatcacatcctaagaacttgggcaagtgactcaacacatagggccctctggtttctttatcctaaacatagaatagtatctaacttgcaagactttgtgatactaaataattttatgattatgggtaaaatgtctgactcttagtgagagctctataaataatagttctaactactaaaatagtaaacttgggttactttaaagttcaatttaatctcttcttctctgtgaaagaaaaataacatagtaggtactcagttaatatttttcaatgaataaagtccattatatttgttagaccattgttaatatgtttaagatgctagacatatcagaaaagattttagtataagccatgcatgaaacctattggaagaagaatgacttaggcagtgatggtatgaaagggcagtgatgacttttcacatcttgcaaaaagctgggcttggggcagacccaagcaatttgaggctgcctgactgtgctgttatttagcacttaaacttatatggaattgtgacttaaataccagtcacagtttaggagatgtagatatttgaaatataaatttggtcatgggggtcaggataagtgcatttgaggtttttttcctttttttccgtgggacacaacattagcctcttcttattaagaggaatctcaagttaaataatagcatatatttgagtaacatataataacatgtacagtgcacattgattggacatacatattaaacgctggagttaattggaaatagactttagggaactgttaattttcctgttggtactattttgatgtgtttctgatggtgccattttgatgcctctaaccacctttgacctgtcctctaaatactgattatagcataaaattttggaataaaggtaatgtgtctaatctgaattcatcaagataagaatataattcttttaagagtagaagttgattaaatacaactgaaacaacaattaatgtgcagaattatcctctagttagacaacaaatagacatgaaaataaaacatatcagaatgtactgtgctgatacattctgtaagggagacaagtagacaccaaggatcatggacagttcaatttatatccttcagagtggaaactttttttattaaaatgcaaacaaaactagagctttatgctctgtatttaaacatatattctttgagtttaatccattgaaaaatctattaataaatcataaatccagagtaaaaataaaagatgtggaaataaactgtgatccttaaaattagtagtgggagcacagttttaaacagctgtagaccattttaatttgtaagtcagtttttaaaagatttcaaatacatgacagaaaaaaagtaaagtactagagaataaaaataggtagaaggaaagtttttcagttcattctactttaacttataaatacataagataaatttgcaataaaataatcagtttaaaaaatgaactgctggtatagcagtttcccaatatattcttacagatattaacttacattatcctcacatgtagatattattaaccccactttacagaagtaggaactgaggttcaagatgttttgccaaaggatgctccagttaccttcatgttacttgctctctgcaccaacatggcaggtgaaacagcaaaggtagagaatgagggggatatccctggcttgaggaacccaaagcctaagtatacttaatacttattccaagagtttctccatagtttcctcgtgttgagttaaatactctccaagatgtcagaggttgaatcattaaatgatagaatagtagcaaactagtggtttgtagaggtgatgcagctctcagagagctttattctttattagttcataaatcgtgatggaaaaatcacatgggccatatctaacatctggaagttgtactaatttcagaaagtattttatttcatgaaaatctattttaaaaatatttaatctgtaatatggaacatacattttatatttttaaataactactttttaattattttaatatttcacactgtgataattttgcttagatcttcctggagagcagtaacactagtcttaaagaaaacattttatgtttgtatatgtaattcaagaatatcaaaggaatctataatctaaattttgatgtatttcactgggacaaaattaataaattaataagaacctttacttgccaaatataatcagatatcttagttagggatagaactggtgaattagtatggaagggaagtgaactatttctcttattgtcttcaaaccaatatttataaaatattcacaggatattattgaaaaaaaatgttctggttcagtagaatgcctctctatgctgattttcctgttgagctgggatattggtaatctatactaatgagtacaagagccattgcagattacagtattttgggaattagcaactaagcaaaacacacaaattaaagaatcaagggcatcataaaatgtactgtatcataaaatctacttgttcatttattttgacaagtgtagtttaatttaaattatttatggtactgtgtactccacaagtaactgtaacgtagtgcattttgttaaaaataatgaagttgaagctatatgagcttttagatatcattgtgctaaaagattagagcaatcaatccattttttctttaccatttctacagacttttctacacacaaattcatagtattcatagtattttcttttcctattcagccacctgagttcactgtatatcttggcaattattttattacttatactttaattagtgaattctttgggaatgaagtttttcataaaataatccatgttaaaataaatgaaatctcccactaatctagtgatttgttgtaggtgttcactattccactaagttacattcttcctgttaaagtttacaaattgtagttccatatgacaaaaatatctctttgcccgtactctttttgtaaagtgtagtgtgatagtaaggacactgctttggcattagataaacctgaattcaactcttggcctcattcatgctatttaacctatctctcagctgtaaatggattaattctttctaagtgataacgtttttgtgaactagataaaaactgaattatctagtacagcgcctggtatttaatagtctctcactaagttgtggttgtcattatattaactagtgttaacctctgaaaatttgtgaaattggtaacattggtcttcaaaatcagctttctctttctacatttttgtatgttgttttctttcaggacagtgattcagttctctgtctacagcatacacacacacagcattgtctactatggccttccagaataccagaaaaatatttaacattcaccacacctgtctcaatctctttttcttgaggactctgaactttcgggaattaacactcaaaaagtgtggtgcttaaaactttacctgtttagcttcctttagaactgagaccttcatattagttaatttttgattatattattactccatccattgcatcctttctacctctacacttataaggcccagtagttctggtattgaagaattatatcatttgagcacatacatttgctgtgaagttattatcaaataagactatgttccatataaaaggcaacactatcttctttggaaaaaataagaaattgatgttactatatgcttagcagcaattacattcatttaaaaaaatattccttatatgttgggtagagtttttgcttaagttttacttattaatttgtggcaccattttcaacttaatttcaaaagtgcacatcttaaacactattaaaagattctaggctgggcatggtggctcatgcctttaatctcagtactttgggaggccgaagtgggaggatcacttgagcccaggtgttcgagacaagcctgggcaacatgatgagactctgtctctgcaaaaaacaaaaaagttagtcaggtggagtggcaatgcctgtaatcccagctactgtggaggcttacctgagcccaggaaattgaggctgaagtgagctgtgatcatgccactgcactccagcccaggcaacagagcgagaccctgtctttattttcttttcacatatttgttttttgtttgaggtatgttataaataccttttcacatgaaagatttagatagtcatgaagttattactaagaaccaaaatgacaaaactttattaaaaatgtaacaatcatccattttattcctcccctattgaaacgcttaaagcatataaatggtctatgctttagagaatccttcagaattacacatatgtcaagaaatctaatttgtatgcatcagctttcattcctgtgtttgtgttggctttaagtagcagcacagcttttaattgtgaggttttaagttctgcaattaaaatgtaccctttttactaggagggttgagtgatagtttttgatttactttagacagtttagacaaattatatttaaaagaacataaagatgcacagagcatttcctgattcagagaaggtcaaagtgtcttacttgcattttttgaaagttttaccttgaataactaatgattcttcttactgtattgactaaacttctctaaagacatacaagcaggatgtcaaactgctttaaaacatcaacttctttgaaatcaatgaccaaatgaccttgaacagaatagggaacatgatattttacatctcatgatgttttattaaaattacttctatgaaggatgcagaaatagattacattagtgcctccaaagatgcttatatttctctttttattagttatgtgtttataaaaataatgaaaattctttgcaaactactagaaaatttgtttagagctttgatcatagcaaaagtgtagtagaaattctgcagacagatgtttaatttgatcaagggagaccataaaatggataatcctggtcaataatgaaagttgaggtcacagaaacaggtttgtggaataatgaccacaaaaaaatctcatggagacctttgagaagaagcacagtaaagaggcattacaactatgaaatagaatttaaattaattccaaaaattctggggatatctgtgtaagccagaaagaaaagcatttcaaagacacagaaatataaaagaaagcaatttaagatctgcttggtgtaagtgggtatggtgaagacgttggtccaggttgggtggtgatgtcaaggagagagtaatggtcagatcacaaagaatcttatgtgtaaggatattaagcaggggagatgtataattcaggttgtaattctagactaaataaattactccgactacattatttgataaggttgacattaacatcaggaaaagtaatcaagagacaactgtaatcgtagaggctgcaaataatgaggactttttagactaaatttacccaggcagtgtcaattggacatagaaaatttggtaaatccaagaaatatttgggattttgaagtgagagatattgctaaagtatttggataggagtaaaaattggcatttggattaattttttaaaatatttttactgtatctgtcaattttcaggaaatcaattaccaaaagttgatattaacatcgatgtgatgtagtgaccaaagatacattattagattcctatttctagaaatatgtctcagcaaaggcataatagcttaaaataaaaacttaatttgttttttggaattaaagcaaaataaaaatttacttggaccaatcttaaaccacacactctgttttctctctgagtttggaaagatttatgaagttgcccagttgttaatggcaaataacagctgctatttttacatattgaggattttttttttttttttttttttgcaatctgtgataaatactgacagaacgttataaaatgacaggggcgagggaagtgcgaatgaactggcaaacacaagcttccactatttattttaatctcactgaaactacagtactgaactataaatatattagcaaataatgttattggcatatttttgtgttggatataaacatgccatgttggatttgtttttggacataaaactaccattttaatagacagttgttaatatagcacaaatattacttgtgctgatatgaggatgctgatttaacttgttcattctgttctgcaaaagcaggaactgccttgggcaaaactgcaaagtgccagaagttcctctcttgggcttttcttctcattcctggaacccacctatgccccggagttgaagcactgtccctatttacttcccttgtgtgcaagaagcctatgatggtgttctcaccatattacctatattgtaatgtaaactcatctctattttataatttttagattcataatcggttgatgaaagaaattaactaattgtggtatgttaatgaaaaagtcatgacattttggaagaactccatcactttggatctaatttaaataaatcacactctccatggagatcttagactacatagagaagtagagtgataccatgataagttagtgaaaaatatttcacgataggtaggccaaaagtagactaatagtattgtgatataatgatgagctttgagaaatctgttcaggaaattcttcataatatgtaacactgcttagatttaaataatttgattttgattagaatgacattaacaagtactgatatgtaacaggtacttaatgtctgaatttttgtacttaagtctttgtgcttagggtacttatcagtggctgactgcctataaggcaaaaacatttaaaaatagaatacaattttttctagttaaaaataatggaaaaaaaagaaattgtcagcttatgttctctcacattctaagttaattttgtgacaagttccattttcccagggtataacattaatgccacatatcaaaaggaaactgtataattctgtgctgtgattgtcgaatggctcatggaaactacttaagtctcagcaaaacactcttgatttgtatagctaaacacctgggaaatttaaaataatctagaacgacatttcctcaaatagcctcagattttaataaatgaaagatttgaagaatatatctctttaggaaattgtccttaattatcttttgatgaaaaattccacaaagaaaataatacaaaaattataaagaatttggccaggtacagtggctgacgcctataatcccagcactttgggagactgaggtgggcggatcacctgaggtcgggagttcgagactagcctgaccaacatggagaaaccccatctgtactaaaaatacaaagttagccgggcatggtggcacaagcctgtaatcccagctactcgggaggctgaggcaggagaatcgtttgaacccgggaggtagaagttgcagtgagatgagatcatgccactcactgcactccagcctgggcaacagagctagattccatctcaaaaaaaaagaattcaaatgaatattattatcgcatttctttctccaagcaaatataaaagctgtgctttgtatcactgttaaaataaaacctcctcctaattattgctaaaatatttgtctaattaaaatactaagcattttcagaagactctaacggtaaaccaggggattcagtgcatttcagttctatatttctgacatttacaaggatgacagacaatgcaaaaataaaatgttatgtgttttcctcaaaaaacaaaccacagctggtgggtttaattttattcctaccagccgtgacagcaggctttttaaatattgaaagtgtgaattaaagcttctgcaaaacaattgccatataaatttccttaaccactatgaattacatatgaaatatcaaaaaattgtcctggcttagctgggttcatttttaaacataatgggaatagaaaatgttgactcttttgaggcaaccgaaacctcccagagaatgtagttgagtgtttgcgtctcatagattttggtggttgtcctcaaaaccatcaagaaagtagccatcaagattccctccttgttttctagtcatgtcctggtactttgatgataattgtatacaaatgtataaacctttgtaaggttattgactctttacaatctagctatctgatgataaaactttctctgaaattaaaaatattctacgccccatttggttcagtggctactgacatgtgagtattgagcacttgaaatgtggcaagtataattgaagagctaaattttaaaatttacttaattttaatttaaatagacacatgtagctattggctactgtattgcacagtgaagatccataacatgaagggtacaatactgtgttctgtgttccagagaagacaaagcaaacaaacgtgaaatacttctcatacggtaggtaagataagatataaatatgtagataaataattaataatacaagtcaggatgttgaaaaagattttagatagactaaaccccttgaaagaacatattgaagcaaaaagtggggaaagatcaattctagtttatgatggaagagaaaggtttatggaaacagaaatgtagacaaactttgactagtaccttaacaggtggagctaatggcattccagagggtgggaactttgtgagcaaatgcagcgctttggcaagaagaggtccaatcatgtagctaatgagtaataagatttagctagagggtcaagaaagaagagccttgaatattggctagggcctaaatacggtaagcaaagaagtcttaaatatttagtggacataagagaatcaatctctaaagatgtagggaggtgaaataggaggttataaagtggcccaggagagaggtttgatgccagaatcacactggtcgcagtggtaagagaaggaagatgatggggaggaatgtcttgggtgcattctcccatagctgctgtctcctatagtagcatgtattatgtatttcttctctgagacaaggtctcaccctgttgccgaggctggagtccagtagtacgaacatggctcactgcaaccttgacttcttgggctcaagcaattctcctgccttagtctcccaagtacctacaagtgcatgccaccacggccagctacgttttaaatttattgtagagttagagtcttgctatgttgcccaggttggtctctaactcctgggctcaagcaattctcccactttggcctctcgaagtgctgggattacctatgtgagccactacacccagctttgtagcatatatttttaaaggggaaataaaaagccaatctgttcctcctgtacacctgtagccttctcagcatagtacctaattatatttcatagtggtttattttcaaatacccagtcctaggcacaaacacatgacaagatgtctaagaatctagcaagatccaatgccttaaggcttgattttaaagagaggaaagagaaggtgctgagatatcagcccgttttcattgctagattacattgatagtgaatagatgggaggaatagaagggaaatacaaacttactatttctttgtgagctgatttaagcctgattccatgtttataaattgtgagaaaacttaaagctttttccacgaaataaatgtctaatagggtcatgatttttttcttcataatttgctttcgaatgagaaagttagaaaatttaagtagagacttcaaaatataagggtaagttgtctatgtgaggaatatttattcatatatgtagtagttacaattgttaagcttgagaaatttgcaaatttacaatcatgggcaaatgcttgaacttggtcgcatataaacaagaatatacttcggtttaaaatttgtaaatataagttttaaaatgttcaaataaagaagtgacagttccaattctttagtaactatcctagttaaacgcatcaaaaaatatacatgaacagtttacttgtaaaatgttatcatactgttagagagggtgtttgttaagaatctagttgtgtaatgaaattgctaaacaggatgttaaagcactaccaggaatcttacacatcttcagcatatcagaaatcatgcaaatgttgggctcaaagttttagtttgttcaaaaatgctttcagatattaaattggtatcttgttcccataaatactttttattgatgtgcctttgttttaggaacatttcaaaataggacttaagagattaaccttaatatgttcatacactttgaaattttacccacaagttattatgacaaacattttgtatataatgagaaaagtttattttctataaacgctgggtaaatgttggaagcagaaggactttgtttttgccaactgtttgcttaaacctacacaattaaatcacaattattactgcttctctgaacagtttctaaatttttggttcacatattccttggtttgtagatgtgtatgtgtgagcttttaatacaaccaaacttttagcatatctataatcactacagtcgttttgcattttgagtgtgtttgtctcatactctgaaaacaatggtatattttttattgcaaattaattttgttttcattattcacaaaagcctgcaactcttttagttattagaccttctttgttttgatttaaacatatcctcttactaaaattgtttatattcttcagtttatattaatataaagaataaaatttttgttttattttgttttccctggatggaagatttacacatacttgccacattttctggttgctctctgtttctgttagctttcatcttcaagctgaaatttttctaattctttgtctttctttcagtaatttaattccaccagaacagattaaatatgctttatttatattagcatataaattaataatgattcaaacaattatttaacaaataatagaaaaaagtattaaatggattcacaaacccagttagccactgcttgtgactcagatgctgatagccctatttctcaaagttattttttctctcatgtttctaggctaaatttaaatcgatcctggaatataagaaaaataaaggatggtgaatatttgctaaaaaagcagacaatctgaaaggattaaaatgctttaatcagacaggaaaaaaaaaggctctggccacttgattagggctgatttccaccatctgcttatacttactgaggatctagccctgactgaacactaatttgtgcacttcctagaaattgaaatctctcagcaagcaaattaacaagagcagggattcagcaataatggagctcctcggcttttgtttctctctgacagatggacagggtgcgctcaaattgaattcagctttaattgcattgtgccatttaaaattttatctgctccacagattttgtttacaggtttcaggattccaaacctttggaagtttttttttttttttcttttttcagtactgggcaagataaagaacattgtaattctgtgtgactggaaggtgttcattacaactccttaccctgaagggtggcacgttaagaaaaggaattatgttttaaagtctggggcaaatgggaaacaattcagactttgcatatgttcaaatattagcagctcataaataaaagtaaccagaaatgctctgtatttcatatctaaataagaaagcaatttgccttgtttcaattaatgcgtttcaaactttgcccatcagtgtatcacttggaaccgcgaactcctgaattctagagataaacttttttgtaaatgaatcatgatgttctaaaattacttttagtttctgcttgattgacagtcttcagatagaactgacttacatgaactgttcttttgagcagaggtataaaatactaaatcatttaggcatgtcctaaacattcctgtgaatctaatgctgaagatgcatttgttgcaaaattgcttgtcaatctacaagcatttcctcataaatctatggcttagtaggtactaaactctgacatttctggtggcaaacagagatcctgagagcttgaatataccatcataagatttgatttgcaccctatttatgtgaagattgaagactttcagctattgagcacctttccaggaaggactgaatttgcttcacataaggcaaagagttcagccttaggaatttagggatggaggacttcaagggaaaagagtggattctccaaagtctagaaacactgctgtgtgcttgtctgtaagttacatgtgtataatgcacactgtaaaggcttctgaaatattttatttactttaaaatacatagttgctatttgtttatattgttttattccataatttccttccatttaagactaatttgttcacaggatattagcaatgtgcaatgtctcctcggatatggcagagtatttttttttattgttgcagagattttttttcaaagggactttctaaattattaataataattaaaatgatcaaagagcgatatctgaggacttcaaattagccgctgaatcctattaaaataccatgtagatgtttggataaagcaatttcatcctagaaaacaggcttacattttatcataatgagtcatcttaatatttttcagaggtctcagctaaatgaggatttgaaatactggttaagtaatcaagtgtaggtgttgtagagaacatcttagttttatgaactttaggaaaatctctcctgataattcttcatatgctgtacctactttctttataggcagtcgggagagaaagtgtctgttgtaaaagagcaaatgttatcactacacttaaaaatctagaaagaagttcatctaaaatttttggcttttcatgttttataaacagggcttcactgagcggtagagagtgctgatctaaaaactatacttgcttcccaaactcttgtgttttcccttgtgtttgtcaaattgtgtttattttattctttttagtgctccggctattagatttctcagctttctattcccctttgcttctttgcaaccattggaagcttctgtgccttattttagttcctttctcagatgttgttcttagaaagaattaaatttgtatataatcacagtgtttgagagccgaatggaaccttagagatagtcttgtccaactttcgctttttataaatgaggaaactgaggcctggagagttcaagcaactcacttgaggctagcctgtgtgtcagcggaaaggccaaaattaagacccagactcatgaatctcgtcagagagaaatttctggaaataccaaagagttcactccccaccccacgtaactcctagtgcagtattcattctaaacataaatagaaaaagtatccataaactgatcactaataaaatagtgtacacacatataagacacatgaacaatcaagattttttccatccgaaaatggagatataatgattcctcattgccagtagtcataatgcctactgcatttgtaactcagacccatattttttccttttggctcttccaaaatacattctgcacctaggccataagcatgcatttgtagattcatagcttcaaattttggcaatttgcaaaaccacatggccagatttgggccacttctacttagttgggaattccatcatagaaatgccagtcagggtgccgaatgaacctactgttcttttcttgccaacacagtggttgagagccggtatgtgctatctgtctcggttttatagtctggtacaataatgtcattgccccatgtggcaaatggtgtaagctattgtaaaactgtttgtctatgtgattaagacattgctgcagtgtacagcaccagccaattacttttttaatttaattatagcagaaaaaagagaatagcataatagaaattcttgtcatagggaatatgtaaaacgtaaattgaagagccatgaaaatttcatgcattggcagccagatttgtttttattttcaacttgttataaagactgcatttattcaatgccgtaaaataagacataccagcatttagtaattacttagttctacatcaaaataattatatcctgtatgcacttgtgatctcctttactgtatatgaatgtacaaataaacacttctgggcctgtatcagtttttacttttagacagtgtaaataaagctgaatcttcaactttcaaattaaaactgataaccttgggcattcaaggcttttataaaggaaggggggaaactttagcttcctcaaaacaggttgtgtctctggaatgcttctgggactaaagagatcaattaagtgtgtataaacaaacagttggaaaaaagctactaaaacaacagaggagagagctctctattgggctccagaggcctgggggagcgaagtttcattaactggatctgaagtcctatggccttctataaacaggcattaattaaagaatgtaaaaaataaagtttcagaccttgcaatatgttaatgatcatatgattcagggcctgggaaggagaagagcagcagaggtcataaaataagcatgaagcatttaatatgagtgcttggcagggatttctgcaaattagttggttatttgctggtccaaagcaaattaaggtgattttgcttcacttgctaattttttatgtgcatgcttggcaaaatgtttttcacaaatggatgaaggttattgttaatggcataatgagaaatattaacatatttaaataaactccaaaattctgacatacgacacaagcatgcagtttttatttaacacagacattgaaattctattaggatctgaagatggttttagacgaaattatggaaaatactcaagtcatattgtttgggtgtatgaatgcaccttaagtacttcttcatatgtttgcataagagtttttgaaaaaaaattataggtaatggatatatatatatatatatatatatatatatatatatatgtatgtaacaagttctctttaaaatcatctttcatagttcatttgcttgatgccggaaaggggaaaagtcaaacagataaaagcatatcccaagagtaagatactaaatttagtcatttaagtctgcttatggtgtttggagaggtgacatttttgaaaccctggatttggagacacacagcctgctttctttcttaatttacttttctatacctatttttattttaattttgaccaggctaagttgttctgtgtttatatatttctacttggttccccttaaacggttacatttcatctggggacttaaagtggagtttaaaaatcggagcaacttctctggaaaactcttttgaaattacagtgaaactgttctgtcactttaattaccatgaagttgcacagaagtactgaatttggcaacagatccttatatagaaggaggtgctggagtaggatgctgctattgacattgttctgttacagcaattttggatggacaaattgcagttgagaaaatttcatgactcggtaaaatgagcaatgatgacatctgtggatgcgggtctgttcatatccttgcagagcctttagggaaataaatatctcggaacattcggtgaagtgaagctcactcaataaatcaacctgacacaataacacttctggcacatgagccctacttctcctcagcaccaactacccctctgtgttcctgtgctaccaaatggtgtctccccataggcctctaaatcaaatcatagcacacaaatacagtgagaatttattgggaattggttttgttcggcaaaaacattacttattagatgaactgaaatgataataaattttgaccctttaaggactgagccagttcagtcaatgtactgtttgatggaaggcatctagaattatcttaagggtatcatcttaccatgagctgttttaagttttattgggattacttttctaattttcagcttaatttttttgatcacatcacatggaatgtactgtctgcaagtaccacgttttcttttctaaatccttcagggtgaaactgggacatttgttaggaatatttaaagtaatgagcaaaagctaaagtgcgtgtatattaaagcagctttgaatcaacacaaggtaagtacagggtggttcaaaaattacaatatgcaactaaagatttctaccattattagtaaaatgatcatacctgagttaacaaagtgagaaaggagaatattatcattaataatattagaactattgacacatacgagaggattatgttaacttaggtgtatttggaatttctatatgtgaaaaaaaacaaaacaaagaaatataatattaatatttcttaccatggagaaataatagctggtttctatttttattatttctttcactagagatagtagttaacaaagaggatcaataagagaaaccagtttcctaaccctaagtgtccgtagatgtccttgggaaataaaatatttttctacaaggcaaagtttactggtgaattttctaattgaatatgtttatatgaactgtccagcttacaaattagtactatatattacttgtcttttatacaaagtgtgtgatgtgtctctatgtgattttcttctttatgagattttctttatgtgatttcctatcataggccttataattagtttgaaatataatattttttgtttgcttaccggccaagtgagacactttttatcataaacatgccttgggagatgttggaaatctttctggaggaacagtgtgtaaccttaaatcattcattaaaccaaaacattatggcatttctaatgggaattactaatactgaaaatttggttaatagtttaaagctttgtcaccagccaaatttgtagaagtgatagtataatatactatgtgttattgaaaagaagaaaagtaagatttttataatagctataggtttatctgcttatagttttgatctataaggaataattccattaactatttttatccaactgcaagaaatctgaaggaacccttaatttttctttaaagaaacctttaagttttaatgatattctggtacaaaaagaacaagcactattattctaacttctttttcatgaagaaaataataatacctaaagaattgaggccattgtgaagtcacttgcagaattagtaaagttgagtgttataaaatccaaaatctagaagagatttcttaaaagaagcatgttcagtaatacaaggcattccagaaatagagttgcttgcttccttcttaaagctcttgggaaaacagaagtctacagccttgcttggaatgttcatgtctcataacgctctcttagatatatttttcgtaaagattagcccaatttcttcttgctatacattattcattctgataattatctatcacctaagcacctactgcataccacttaccacgccaagctatgtacatgcatttttttaaatttgctccttccaacaatattgcagggaagatattatagtgctcacattagagatgcaaggttaaaattagatgaggttaaatacttgatcaaagttatacgtcatacaagtggcttggaaagtatatttggccgatttcaaagtctgatttgttttgttttttgtttgtttgctttttctcagtagcacatactgcccctggaccattgattgccctatatcagacattatactaagtgcatagaaaggtacatgatatgttttctttccctcatttggaggaatctgactccaaataaatgatttcagtgtaaaatgagaatgctgtgggattatagacaaagagttaccagccctccctcgaagagatggagagccttagggaggagctgggagttggaccaggtcatgatgtttaagtacaaggcaaaggagaggaacgaatccagaaagtaaacatggttcactgtggaaatatcaagaagttctgtaggtgaattgtatggaatttgggagaagcattaagaagtgagatttttaagttagaaatgtgaatttactcctatctttacagcgttcttgaagtacttgaggcccattagtgtcatgtctttagcttaaaaaacaaacaaacaaaaaaaaacattttgtaaatgctttgatcatttttcttcctaagtggagaagcaaatctagatatgagcttctaaattagaaatagactttgctgaaaatagtgatattatctcattttatactcttatttatgttactcagtaacataaaaaattaactaggacttccaataatggtttattgaaattttcttttaaccattctttggctatggtttgagtatactatattctatgtatattatttgttagcaaggtttaagatatgcttaagattattggaaaataagatcttgtactctataaagtaaggtttctttttaaagggcattagttttttgtttttacctttcagttaaaatgacaggaaactaagattttgtacttgaatgtcaattcgagggttaaaaattagtataaggaattctgcctatatttaccttttaaaaatagttgcttgttgggtgcggtggctcacgcctgtaatcccagcactttgggaggccgaggtgggaggatcacctgaggtcaggagttagagacaaacctggccaacatggtgaaaccccatctctactaaaactacaaaaattagccgagcatggtggcacgcacctgtaatcccacctgtatgagagatgaggcaagagaatcacttgaacccgggaggtggaggttgcagtgagccgagattgcgccattgcactccagcctgggcgacaaagcaagactccatctcaataaataaataaataaaatggttgctcattattatttttaaaggagattagtgggtaagcaaaccaatgcaaccatgacagaatatttgatgtggagacaccatgttaattcacctaggatttggttagtcctgccctggcaaggccctttttgtgttgaattgtgaataactatacatatgggagattgatacaggaaaaatgggtttgaaggtttacaggaatctgacttattgaatatgtgattgtacatctcattgactcagtttctcatctctaagttgagttgacggagagcatgggcttggacaggctgggtaaatatctagactgtgccactgattctcagaccttggaaagtaacttaactactttatacctttttttttaaggaaaaaatggataataattggacctaattatagcattaaacacagcaaaatgcctgccccttataaagtctcaaaacatattgaaaaaattattaatggaaataaggaggttttaagaccagaactgtgatttggattctagctccagctcgccctcctactcattagctgtacgaccttggtcaagttacttaaactttctaaacctcaatttttttcactaaaaaagagattaccggctaggcatggtggctcacgcctgtaatcccaacattttgggaggctgaggtgggaggatcgcttaaacccagtagtttgagaccagcctgggcagcatagtgagacctcatctctacaaaaaataaaattagccagacaagtggcacatgcctgtagtcccagctactcgagaggctgtgcttggaggattgcttgcagccaggaagtggaggctgcagtgagattgcaccactgcactccagcctgggcaacagagcaaaaccctgtttccaaaaagaaagaaaaaaataaatagagagagatatcactgggttgagaagtaagtaaaatagatgttcacatacttacttcccttttgtcttcaatctatagcaaggaatctggagacttggaaggagggagattgaaatgaaaagggtgtcttagaatggaaacttaattcagattcttccattttgaaagtcgctgaagagtcttctaccacttctattttcttgagtctcaaagatatagttaagcagctttcgactgaaaatattagaagttcagttcttcagtaaatacatgttctaacatccttaaagtataactcaaagataactgagaattctggacatttaagtaaaactgctaactagttttactctttttcacaatttctgcttaactatatgctacttttggaacaagttaaccagtgttttgttatgattgtcattatttcagttaaaactttaaaaatgtatttttcttaatatgtttgatacttctcccattgaagaagtgaatttagttgaattgaaagaggctaccacacaggttaaaagctgctccaaaagagaggacctttacaataatattcttaggaatatagtattttgcagctctcatattagtccactgtaggctacttacctctttctttcattctgtcctctcctctttcatgaagagtcaggtaaaattaatgtaggtgctcctagctctagtgaccaattactaatatttcctcccaactgaatgtggcatattaacactgagagcaaagaacttagtgtctacaaaataaagttagggctagataaagtcgaatgatggccagccaccactaagagtatatgcctccttctagtggcatgctcagtttccatttaatagagggtgatattgaacatacagtgaccacggattgatcatatacaaacatctgaccaggttgaactctcaatttaacatctcaattttaaatttttacaagttgagtttgacaatattttttgttcaccctgtattgtataaaattattttcagaatttattgtctattatcaaaactaaaagtatcctttgactttgaggaaaataggaaccgttagccaccatcttcagaataatgtaaaggctgattgataatcatccatcttgtttttttcctgctgtctggattccaggggtgtgtgtgtgtgtgtgtgtgtgtgtgtgtgtacaaaacacttattttagaactcacatttcctttaaatacacaatttgttctgctttaaattatacttaattatttatttctatctacatcacattttgcaaactagagttgagcttaatatgtcatttattcagagaaatttactgggcggaaaagttagagtaaaatgcattgggttgggttatatatgaaatgttaacaagtattaaagtggtctcaataccacaatccggtaaggaagcaagatctacaggataagaagctaagaagaaaagtaattaaaaggaagcgacacaagaggaaacgcaaagacatacatcatcatgtaccaaatgagtgatacagttagagtgtccctccatggaaaagagggtgagctttccgtgggttgctgaggtggctttggtggagaggttgctagctagagctagactttaataataccaacctagacttgattgaccagcaaatatgtgaaatgagcaaactatattggagctatctgcttctttatatacttaaacaagttgtagttgggcagtcatcaaaatatactagttttgatgaaactttattgcccatcaaaatattataatcccatttaactgtgaattcacttggaaggttagtacttttaagaatagttccacactcaggccaggagcggtggctcatgcctataatcccagcactttgggaggccaaggcgggtggatcacccgaggtcagaagttggagaccactctggccaacatggtgaaaccccatgtctactaaaaatacacaaaaaattagctgggcatggtggtatgtgcctgtaagcccagctacttgggaagctgagacaggagaatcacttgaaccctggaggtggaggttgcagtgagccaagatagcgccactgcactcccgcctgccacttgggggacagagtgagacttcatctcaaaaaaataaaccaaaccaaacaaacaaacaaagaatagctccaccctcttattttaaaaataaattatcaagaaaataatctgcattagcctcagaagataatatttcttcatttagtgtaaatcattgtttgacgtccgaaagagcaaatgggttatattagcacagctggttgcacatggcacacttttaggtgtaagtaaagagagttagtcctaaagaatctagatttgactaaaggaagatcactgtaatatgcttctgataattttggcccattgtacattaatacacagaaatgctatcttgggaagtatctaaaaatcgttgtcatgtcagggtttcagtcagctgtttcgttactggatatttcttgaaaaatagtggatcatttgaagacctaataatttgagttttgtttggcagatttaatgttcatatgttgttgatgtgatcatttagcctatacttcaattaccggggggctctatgaactgttttgtaaattttgaggtagttgctttgatgcagctgtagaataaaacaagaacacctaactaaatagcctttcatctttccttcaaagcaagaaataaaaataatcattgcaaagtaatgcttttttgtgtttcttagattttgactttcctgatcacctggaagttactaacattagtttgtcttgcaaagccaacatttgtagaacctcttctatgtaagagagattgaactaaatgaaatgcatttttcaagtaaactttttggtagctctcattatactactttggttctcataatatttaactctagagttttgcttttatctttgtatatcacataattttagaaggcctttttaaactacagcatcttaaccaccaaatatttattaaacctccacatccctgcattatgccaaaggccaaaacgtgaaactctaagtcaagtcatcaaaagagtcatgttgacttctcgtttttcttaagcgtcaacattataattcttgaccctaaggagacattttagaattggttcctgggttttagtgggacttctagagatgcttcagttaaaaactatcatgcattaagcaaatccatgctgtgaaatcactaaaaggtatatataggttcgactaaagcattcgtttgtttttcttttgcactgtaagaaaaaaaaagtctgtttcaaatcctatttgtcccttatctctgtttgttcagttgtttttaatatcacatactgaaagaatttcaatagcagtttcaccatgaagtcatttgttatccttcagcaggcttttgcctactgaattgtaaagcagttctgactatttgcatcctccagatggagcggcatataaacactcccagatatttctggtaagtatgaaaaaatatcttatttgtcctttctgtgaataaataagagaatgtcaaattttatagactaataaatttgtatgccggcactgacattgaatctcttgtggcctgcattgtcacagaccctgagaaacacattttttgttgttgttgttacagatgaatactaagtcaaatagaagctcaataaaaggcacggtttgattgcattgtttatgtctgtccaatattctaattcagttgcaatatgccatgaggaaatgcaatttacatgtttcccaggtttattgcacaacaatcactcactcatatatacttctatctgtcagagaaaaccccactaatgggttaaaatgccctttagcgtgtagtgtgcaacagctgccttcccagtagatttaatgttaatatttataatgtactcttacagatatagaaaaaggtgatagtgaaaggcaacataaatacctaaattttttaaatctaaaacttttgatatgtttattatatatatagacttatatgcacatatgataaactcagaaataatactttttatgggataaatcagatcccatcagttcaagcaaatctttatgcacttttccaacttaagattaaatttatttcttattttaaattgatatgcataacatagggtgtctaatcttcatattcagttaaataatgaagctctgcaatatcagctgtgattgacagtttaatactgcttttacacttgccagttttcatattaaatcttctagtttcttcctaaattaaatgcactgtgatctaaacagagtaaaatcatacattttacaaagtaaacagaattaaataacttttgagttaaatgtgtatagtaagcactgagaatttgacttggcttactttatccatgtgagataaaggaatcttgtgaactgaatacagactgattattttccagtctggtttttttggagaaggaattttaataagtaatacataatatttattttctttcattgttacaattaaaacagaacttggtatcatatttgtcaacactgatttgatttctggagaataaatttttctaagtgcattttagttgaatgaaagtatatctgagatataaacatttagaatcaattgtaataatgcttcagaatggaggtttataagagtttggaagcacaaattctatttaagttattacaacagcatatttgtatgcattttttccaattatgagctgtgaaaaaaggttgaagttcaacttgggtacattattttcattatgatacattagccacacatgtctgcccaaatgtccttgatctctccaaaagtaaccataagaaattaaaagtaacaatgtattttacattttatgaactaatatagcggtagaagaaggtgtgtgtgtgggggggtatgtgtgatgtgtgtgtgtgcagtaaactaccctatagcagacaggacaaatatatttcttcacatttgattctaaatttggaagttatcacaatattaaattatttgattcgttatatgttagtataaacatataggtatatatatggacatacacagaaatgtatatgcatatttgtgtatataaacacagatactcacacatataaaagccacaggtttggcccagaaactggctataagagtctttatagactaactgaatgtatgaattggaaagaacattagagtgtctctaatcccacctctttgtttcatagattgatccccaggaaagttaaaatggtaaagttgaaccagatctcacatctagggattctaagacctgacgtctgtcttccacattgcctatttgattctggcatttattgtatctgtgaattgttttggaaatttctagtggcctaatatctcagcagttactacaaaaacccacccacacatacacatacacacatagtgtgtttatatattcacatatactatacaaactgtataaatatcagttaaactgtcactaaattctatacactactatatcactgtatttttaaaaatagttccaaagaaagtgctatttgagctcctttcagttattaagtctcctaaacatttatcttttgtttattgacatgagcctcccagatttccgctcattttgttcagctgtagtaaatttggcattaaaggatgatattcaatccttgcttcctttatagagttgcaccaaagtcaatgagaatgttacgcaaaaataaaggataaactatggcccgggaatactcatttaagactgtagcgcagacccacaagactaagttcagtgcctagtaaggggtgcgtgctaaatttgacattgcagaagagtttccagctgttggcttgatatgaaggaggagagctgtttttatgactgattactgtcctcgggagaaagaggcaagcgaagcgaggctacatctctccaatccacagaatgctgcgcatattctgtagcaatgatttgcgaaggctcataactttaatggttcatcatcaggtgtcatgattctaggctttgaaaatcctaaaacctaggaagggaagagaaggaatatgtgtaactaaagatgtaaaaaatactctaataaagtaagattacctttttaaaaatttcatgctgatgataagtcacttgtggcttgtctctctagctaaagtaacacaactagactttatttgccagctgtacttagagatcttgattttatgttttaaaaaatgtcatctcttccttcaatcacttgtaagtcccctgtaatctctttttaatgtaagcacgctggagttttcccttttgtttgctgcccttgcattatttactttgatctgctgtgagaaaatctgaaagtgtgttgtcctaaatgctagcatctcaccaacaagatttgaggccttgtagttcgcattgaagaaaaaggctcttgtgtgaagacgcaggttttgtttagttctctctccctggtgggaaccttaattgcattttctctctctcacagtggctggctaaggagtgcctgccttccctgctgatgctgaagttttcaagctctattactctgtgacggagaaaattctttggtccaggaagaaaaggatcagatttttttttaagtgtttaaataagtattgtcaatttaccatgcacaataaacaaaaagaagaagaaacattagaaaagcttttttttcccctctgaaattctgatagaagttttatgtcactcagtttatgaaataatggattctaaatatcatgaagaggctcagtcctcagggcaaaaagattggacttaataatagccagtaaacaaaaaatattgttaatttgtgtcctttcttagccattcttatatgattaaaatgtatattcaaagggctatttctggagttaatattaaatactgaaatgtatgccattttcagataggttgtaaagatctaattttattaacctttttactttctattattaatacaacttacagaacatgtaagcaatagggttgaatcattagatctacaataaatattttaatttgtttctcatctgacaaaatatacttcacctgcctggctatgaagctgtggccgccatgtcaacttccactttctatgttttccatcctgatgggatgcaaggcattaagagcatctacttacaatttcaaactgtcttaaatatagaagctatatcgatctataatacacaaggcatgtttattgtttgaggcctaaatgcttacatgcacatgtgcataagctaattgtatttttaaaaaactatgtcttgctatttcaactaaaatagatgattcaagtacgtattttatttttcagggccttagtattatttttttctttcctgtggcttactcctgaatcttatattgggctctctacccgccttttaaactttttccattgttagagctatgtttctcttgcagcctccttttattcacatttgccttgttccaagctgttgtccaccaatgcctgcccctcatggtgctcccttgaaaggtatgctctctggtacttgcttgctagtgagttgagaggaccctgcctgtccaagaatagcagtggggttttgtgatgcatagttgagtagacagtgcaaaaataggtagaagaaagtagcatgggattggttagttgaagagggagcaagagagaaaaacatgttaggatgttaagcatgtgaagagaataaagatgctgggtggaaaaagtgaagatacctttctagggattgggattatggattttagctctgaccatatgctcccattagtaatcattgggcctttcaggctttgtgcaatgagctgagcccagtcaacagagtcttttcagctatattgaaaagcagtgatccaacacatgaagtgaaaacatctccttgatacaagagtacacacggctttaggaacacattaacattataagacagatatgattgtcattaaaaacagcatcaggaagcctaggccttgccttattatcttaaaactggttagcaatgtaaagggaattttctaaactctaacttaaatgcataatatacatttgaatacggtatgctctttgggttatcttcaggatagtgctttttaaatcttaacagcaatcacatttacagctaacaagaatttactttttttcattgaatgattaactagcaggtgacacagagagacacacttatataactttgttcttcctaattagtgcgaaataaaaagaaattgaagcagatgacaaagatacaaccgggtttcttaataattttatggagtatatatgtttaacctggcgaattcaggagctaattggacccttattaattttgtggttcagaatactcttacatcttagaactctcacaattgaaaataagaaacaaattgcatttttagagagttcaaaggactctgttagcatattttatttcccctgaatcccattatatatttttatatgtgtacttcttagagaaatttttctagtgatcatcgcttttctagtgatcattactatttattatagactgagaaagaatagtcaattaggatccatacattgctgaagtcttagaacagatctagataattcagcaagtggctattctatttatcagcacattttattatgatagaaattctttatgatgaaggctggggaacctgattattttttaaaataggtcaagaaatggatcagaaaatctgcaggggatttatctctgtttctagtacttcataatgacaaaacttttcttggctaatgagcatgtctgggtgaattctaatatataaagaaaagggtaggagagggcagtggacttctaagagaatttgtataattgcagtgattgaattcaaaagattggaaatagtttgagaggagtaaaaagtgatagataagccccagtttgtgaagccaaacatactctgttttcttatgtgagtgggtgtgaatcacatgaacagaaaggaaaataggccatttttgtgcattgttgtataccaattcagagcgaaaataatgaatttttctacaaaactctggccttaaaattttctactttctttttcttacatgagcaccatatttattctagctttattctaccactacatttaattatttacccattttctgtgaattcatttactgaagcactgtttactgagtgcctacatggaacaggtactatcttgcctacacatagaagttctagaagttagaaaacatcttaaaactaaaagactggaaaacagtgcaaatgtactcctacttgtatgaaattatcgatttattcaggtccttggtaccattacaaatccaactgttgtgctaaagtatacatcacctttaaaacaaaacttcaaattcactgtactctctctatttcataaaggcagcaacctctcagttgtcctcaataagtttttacttttatgctaacacttttgttatctttagttttttttttgttttttttttttttttaaaccttggagaatatgtatttcatctcccaggatgagagccaacctatgttagtgagtaaatagagttaatactatcctgttttttatttttatacctcttaaaaaaggaaacaaaaaaaaaaccttaaatcaaacctaaattattttgtgtcttttatgtttttttccattcattctttaaatgccagctccagtgacactttctctgtgaaactctccctgcccagtcactctgagcaagagttaagtataccatagaaagatatttaaatttcaatcactcctcttaagactccttcttataatctattgtaaccattccttcttctctgcctttcctactaaaggcaatgctcttgggggcaggtatcgttggttatcgtttctgtattctggttccctggtacaatatctgagccataagagtacaggagatatttcttaaattaactcaatcatcctataattactgttatcacattatttttatcttacatttttggaacctctgcctgtcctttgataggaaaacataagcggggatcttgatcttgtttgtatatgttagtgactaaatttcatctctttcttttctgtaggaatattaagtaccttttcctagactttagttataagtttatgttcagaatgagaatggaacttgatagtgattagccagttttcaccgtattttgttcatcttgagttgccttttattgttttatgaaggcatcactatggatctaatacagctatctttaggttttgatgttagacctccaaatcccttacatgtcataatctttctggtgatagtgttgtaactcctttctctgtgcaggaacgtgtgtacgtctgtgtgtatagccactgactggtcttttgaagcaatgcctttatctttgttgttatctttcactgtcaatgccagtttcttattattgatccttccctctttcactgtcaatgccagtctcttattattgatccttcctgtgataatggcttgagggactttgaggaataatttttaaaaaatatttttggtggaagaaatcttcttactttgaagaaattagataaaataatttcaactttggctgacaaatcctgccctctcgttggtttattagcctgcaataatacctattactacactgtctagattcaaatgtgcacaaataactgtcatgaataagtattttatttttgatttctcaggattgttaggtatgaaaatgaaggtaaaaactctggtttagtgcctgccagagtacgcactatgggaaaaagcagatgaatggatgctgatgactaagatagttcctgatgctgtgatttttatgggagatttgtaaagaaactattcactttaacacaagataatatttgatacaaactttaccagtaatacagattattaggcactgggactactggaaggataagaacacaaacatttctttttcagtttatttatttattttatttttatttctattttgtttatttatttatttatttgagacagtctcctgctgtccacaggctggagtgcagtggcatggtctgcactgacttcaacctctgcctcccaggttcaagcagttcttctgcctcagcctccttagtggctaggactacaggcatgcatcaccatgcccagctaattttttgtatttttaatagaaacggggtttcaccattttggccaggctggccttgaactcctgacctcaagcgatccacctgccttggcctcctaaagtgctgggattacaagtgtcagccaccaggcccagccacaaacatttattttctaatgaaatgatgtttaatgggttttgcagaataggaggatgagacatgagtgaaatgtgtccattttgcctgaaacttaagggtctgtaggatgatgagatagttacagctttggagatatattttactgggcaaccaatgtctagttgagaaattggtacttattgcagtaatcagtgtagcatcattcaagctttctgaagatgggatgatctgatccaattcaacattttaaaaacatatgtaaaggttcacaaaccttttgtgtagtgtgtgtcagaaaacagaaataaggaaatgttatactgaactgaggttgccaactcatatctcatagaaacatcattttgttcagtccagagtgatctttgaaccacatgaattatgcatcaaatttaccatgaaaattccaaagaaaaatcataattgttaggtcgtctaagaatcctaaagatctggaccttggccaggcatggtggctcacgcctgtaatcccagcactttgggaggccgaggcgggcggatcacgaggtcaggagatcgagaccatcctggctaacacggtgaaaccccgtctctactaaaaatagaaaaaattagccgggcgctttggcgggtgcctgtagtctcagctacttgggaggctgaggcaggagaatggcatgaacccaggaggcagagcttgcagtgagccgagatggtgccactgcactccagcctgggtgacagagctagactccgtctcaaaaaataaataaataaataaataaataaataaataaataaataaataaaaataaaaaagatctggacctagtgttggcatggcaacagttctctagaggtgagttacagttgcttcctttctgtggacctgtgtgcaggttcactgtggttcccacaggatttgtttgttccctgcctggttcttgaggcatttgagcttgtggcctttattataacctaatgaaccaaagggaaggcacagtgaaagtttcaaacttaccataacaaaatctcgctctgtcacccaggctggagtgcagtgtcactatcatagctcactgcagcctcaacctcctgggctcaagtgatcctcccaccttagcctcccaagtaactggactacaggcacgtgccaccacacccagctaatttatttttattttttgtagagataaggtctcgctatgttgcccatgctggtcttgaattcctacgttcaggtagttctcttgccttggcctcccaaaatgctgggattgcagacatgagccactgagaccggcctattcttagcaataatttgaaaatgtatttcactattcagggagtgtaacaagaaagttaaacaaaacattaaaaaggcaggaaagaaagtgatttcacttttatagcacattttttattttaccaaaggaagagtaaaagttaagtgaaggaagagaggggagagaggaacattcttttcattaagagaatttttttttttttttgagatgaagtctctctctgtcgcccagactacaatgcagtggcgtagtcttggctcactgcaacctccgtctcccaggttcaagagtagattttcaacactgataattctatcaacttgtagctaattttcaaaaatatgtggtagcctctgtttcataccgtgttatttgtaatgccctgcatattttatttgatatgttttataagggataaacaaaataatatatttaatctaaatatacataaagtgctccagaatcctctgaaatttaaatgatagtgtcaatgtaaaaataatgttattatttgattgatcacataaaaatgttaatatcatataaatttatatagcacaatgaaaaaactctaaaatgcctcactgaaccttcctcagttccctcaacttgccaagctctttctaacttttcagtctttgtgtatgcttttttatctggaagcctctcccgttctttcccttgctgatgtaattcctattctggtcacagttctttttaaatctctattgatctttacctgacccttatcccccagtaatgttttatggtttacacagcctttttatatataatatcccatttgatccttattattttcattcattcattcattcattcattccttccttcataggatgtttttgaagcacccacaatatgccaggcactaatatagagaagaggtttccagagatttaataaagagtttttgttctcagctcacaatatagtaggaaagagaaataagtctgcataattctctgtggtgagtccaaaacttgagatttgcacaagtagaaacataaaataggtggatgcggttgagtagaggtggccagggatgggaaggaaaaagacagggaaacttttttgttgaattttgaagatgtcaaagaagagatctgggaatagaggggaaaggagaggtggagaggtagcaagtatctccatcactccatgaaatggaactatttttgtttggtgtggttattgttttaccacttgagcttccaatatggtttaggttgtatgcaaagcgctctgcaagcattaagtcactcattttattaaatgactcagtaaagtaagtactttttacaagcaaaaagttggaggtccagagaaattaatgtgtcttactcaaagtatattttgcgttgccactttctgcattctattttctaaatggtgatgttaaaagggtatagctgttctttctcagatatctggatgtgaatgaagttaagttttgttctaaaatccaaaatcaaactcttaaaacgttttctgttacctttgcatgttatatatatatgtatataaatatatatatgtgtatatatacgtatatacgtatatatacacatatatacgtatatacgtatatatgtgtatatatacgtatatacgtatatatatacacatatatacgtatatacgtatatatgtgtatatatatacgtatatacgtatatatgtgtatatatgtgtatatatgtatatatgtgtatatatgtatatatatatattcagccctttgtttttgttaaattctcatcttttcactatatccacactgtaagaaagtttgacttaggtatgacagaagaaaaggtatcaaagttaagtcttgcaaaatgccattcaaatcttgctgaaaaaggggagcaactttcttttctaaatctgtgtatatgaatggttacaatgaaaatatcacataaagctccaactttctggtatctgcctttctttagtgatcatttgataaacaaatgccatgttagaccagtgtttctcctagggtaacaattctataaactataccagaacaaatttattgtttccaagtttaattttttggaaatgttattcttaaagaaatgataaatatatgaaattctgaaaggagcttactatgtgtttcaagagctatgcttaaaacatatgatttctacatattgttagcagaggaaagttgcagtttatatttctttactttcattataagaattttttttataaactattataaagaaaacaatagttatgccttttgaaaattaagatttttttactagatttttcaacttaaatttctccaaaaattggggacatttgttcaacattataaagctataatccacagaaagttaattttaaaactattgagtgctctcatttgtcactgaagggaagtttgaaaacagaaatcagggagtttattcctttaacatttactctaatgttaaagacaaagatcagtaaaatgtatatctcaaaatattaattacatttgacttatgtaaaaatcaaagtatcaagaaattagtgagttaattgtcagaaatctggcttctactactgattctgaatatcaccgactgagttgtctaatctcttggagcaatgcattgtcttttgtaaattgagagaaataactagcttatttataaggtccacttcaattctgaagttttatagttttatttatttatttatttatttatttatttatttatttatttatttattgtagacagggtctcactctgtcgcctaagctggagtgcagtggtgcaatctcggctcactgcaacctcctacctcagcctcccaagtagctgggactctaggcacaaccccttactaccagctaatttgtgtattttttgtagagatgaggttttaccattttacccaggctggtctcaaacttttgggttcaagcaatccaccttcattggcctcccaaagtgctgggattataggtgtgagccaccacacctggccttataatttattgatttaataattcatatatactcaatatgaatgttgagaatagtgggaatattacacataaatacttaaaattaaacgtctgacaaaggttagcaagtcttctatttgttgtccagtagaaatccaaactagacaaaacaaaacaaaaatttaggaaaaaatatagctccaatctacaagtttggcgtttggattagttgttttgtgttttaaaatgatggacataatatagatgcagtcactgccaatataattatatataaaatcacatagattgttaaaagcaagctaggataatgcagttcagaacaattcttgtttatttatacatgagtttctagaagaggggaagtgatactaagtttgattagcatcaacgatgtaccataaaatttttgaaaattttgtctacttaatgcttataataaccctatgatatagatgtcattattcccatttaactcatgaggaaactgagacttactgttcaagctaccaaacagtttgttggagacacgctaagagccaggactgtctgactctgaagttcctgtctctttaaggctataccgtacggacaagaagaagaaggtggaaatgtttcctgtctctttaaggctataccgtacggacaagaagaagaaggtggaaatgtttcctgagctcccctttaccattttaaggaactcatctgaaaacaacaagagggtgattgttgtaaaccatgggggcaaaacagtgaaatatatttgataacaggaattacaggaagctgaaagaatagatagcataatttgggataagacagaaaactatgaataggcctagagtgctttgaggatgcttatcagatgtttgcattggaggtcaagaggcttctgaaacttctgggacagggtctgggtggggagtgatgaaggaagaacaagttgtagagatcaagtcagatgagaagtcacttgctgaaggtaaaagataaagaagacaaagaaaaaaattaccagtgagtgacaaagtaaaagcaacagcagggtttatttggggtgtagaaaagatgctagtttttctatctgggtaagtaaaatttaaatatatgttttattcagtatgaaatgaaatgatatgtaagaaggtaccctcaaaaagtgaaaaagcagctgtataagattatttcacatgactttatgaatgataccttttcaatgaaagcaaatgatccagggactcttaggaattaagactgttatttctccttttttattgcttattatagcatcacccaaaatggaaacaatgaattagcattaactgatctaattctttattaatcaatatattaagaaaatattgcattaaaataacatctaaagttataataccatactatttaacttttctttaggtatttccaaaattaataaactcaattatacataggtgttacatgtcaaaattagccatggtaactctcacttctataatctgacctttctaaaaacctgaaaatcaaaagtttatcttgaatacatcctaaaaatagcagtaaaaagtgacttcataatggtgttgccaaccttggttgtgaaacattttactatggactatttccctcatagattgtgcccattaaaaatggttctgctaaaatttatagtgtaatagtgactttgagaaatacacaggaaggaaggaaatgtttggtcaaattactgcttaattattccaaagctggagtgactggctttgttttgcgcccttttactgaataacttttgataacaatcaaactgaaaagtcaagaaattaacttttatggaaattgagtcatgccttaaattcatttttaattcttatactgcttatttagtaaccaataaaactaaaccaagttgtgctatgaagtgaaggatcataacttcaaataagcaattccattttctccattatccctacacttggctggcaaagagtctctaggaattttttaatgtattatttaaaattgaaaatactaatgttcatactaatatgatgttagatttttcagttatgtttactggcaataacaaaaaatttaaattcagttctgtttactgcctatcattgtgttattttttccttcctctgtcagtgaccttcaaataatcttaataatataaaggaatgtctgtgacaactatattcagtttagacttcacattttacaactaagacaatgttacatataaatacataagaacatatcatagctaatgtatatatctttgtgtgaatatgcatttgtttatatatgtatctatgtttatttttagagacaaaactttaaaaccaatacaaagatattaaatcattttgcgattgtactaagacagtagaaagtgaaatgaacataccattatcttttaaaaatttatatcacagccttaattacctggtttgtctatatggccatggcaccagaataactgttatctgtctgtcttcttcagtttgtcaatttgaggtggcaattgtttttcttgaagagacttgccctgttgcccaggctggagttcagtggcatgcatttatggctcactatagcctcaagctcctgggcttaaataatcctcctgcctcagcctcctgagtaggtaggattacaggcgagcacctagctaatttaaaaaaaaaaaaaaaaaaaaaaaaaaaaaaagcttgtgttgagatggagtcttgctctgttgcccaggctggtctcgaacttctggcctcaagagatcctccttcctccatctctcaaagtgctgggattataggcatgaaccactatgccctgctaggggagcattcttgtagcacctttcagtgatatcttttggtaagcaagatggcaccgatttcacatcacttttggcctagcgatatgtttgtaaagacctaggaacaatgatctttctaacaatggcctgtgttgatgaatcatcaatttagtttcatagaaaatgacagtgacctattttgtccctgtctaccataatgccttatggttttctgaagaagagttggatttgttagagattatagtgccttttgaggacatgtacctagaaagtgtgttctagaatggacagcattctgatctaatacaatgagcacactgactttggagtctgattaacccaagaatgagtcaaaagttactaagcttttaaaatccgtttccacatctgtaaagcatggattataaataatgacttcctcaaagggttggtatcataactaaattatacggtttctaccatataatatgcactcaggaggtgtttcttccttctgcctccacatgttttctactgtagtgggatggcaggacttcatcacttctaccttgaaacctacagtgtctcacaaggctgcagatgaagagagtcattcccatttaaagaacactatgttatgttgtccagtctatttgcatgttgataacagaaaccctccatactgagaaatatagacatgaccagattattgtgtgatgtgtaaaatatgaagataattttggcaatgtagcttctaccttagaagctaattgcttgattttgcatctgttttcagaatactcagtggaactttaggtgtatgcattctagttgtgtataccaatttgtagttgactaattctgcaaatctaactgattaatatgaacaccagaaaaaaataatttcacttcagggcaatgttaacccagggagtcacatcactgaatatcattttgaaaatttgtttattaaaaacatttctttgacattggagcagctaacttgtttgtggtgttgttgctattgttcctttttttttttttttaaacaggcaatagagtgactggcctgtgccattattctatttatagaaagtaaaattaaagccttaaagataaacatgcatagtttgtgaacaaatgcaaaacaacaacctttatgaagattatttgtacgctatttccactggtttactccaaagatatattctcaatgataataaagtaataaaagattgttttcacagctgtttgtctttgattacatatttctttgaagtactgtaataagacagactttgaacctggaaagagatcaaataatgaattgttctgctttgtgaagcttaagaagggattttattgtcgaaacatatagtgcgacatattttttcttctaacagttaaataatggttgaaagtactatgagatcattacagatggactagattaaaagtcttggggccaagtgttagtgatcgttaccaaaaattggtgctttggtttaaaaagtcaggttttacaattaccaaacatttcattggtttagttttgagttaaaatagaacacagtattaatgctagaatatattctcagacttgtaatatttatatctaaagacaatataaaacttacattcacagatctcaaaagacttatgccaaatttgttatccacttcaggtttaggcagattagattaaagagattctgtaaattaaactaaatgtcattagataaaagaacattaacaaacatcatatggtttttcttttatctaaactagcaattttgaaaatgtagcggaaagttcagtagtaacactcttaataggttttcagatgttacatatgaatatggttgtaactattgttatttctacctaaattttccgcaagaattacatagtatctatcaatcagcagaggtgtggtacatattttaaaataatagaattagggataatcattgcagcactttgctcaacctaggatatatgtactatgtagtatcattataaagcattaaatggtaattgggtgggcatttcaatatagcatattttgttattatagttatatcgaaacaacattttgcttttgtaaacacttggcagttcatgagtatacattttagagagtaagaataacatgtatgtgcatatttttagatctcatttattcagcatactatttctctaaactagtttttgttgtatttggaagaaacttttttctttatttaagatataaacctttcaaatgataattttcatggaaatactagacaaaggaatattgtaactttagagtttttatgatgaaggtgtgtttaagagatgtcactttgatatttttacattatgtcctacatttgtcagctaaaaccaggatattgcctcaatgagaaaaagcatgttctgcacttgtcaaaaggcagtaagtaatgattaaaatagcagtgtgaaacgctaggagattaaagtgatgctaatgataagtgagagaagaaaagggcaagctatattttaatccctgagagaatggttaatgacttctattgcctgagattaaactaaacctgtctcatcagctttttctgcctggtgaaaaaaagctctctgcactttaatttattaaagtcttttaaggaagcacattgatctacagaggttaaacttttaaaaattgtgcaaaatacacacaaatgctttaacaaaagtgtgattttgttgcttttaggcatgctcacatattcataaagaacccattgtctattccttagtatgtttaattaaggaatgttaattactcaaactagaaggtttattccttttaaacatcagaacatattcatattactgtgtaggcaaggggcaagtatactgtagaggatatcagtctatatgaagagattaatttacagttgtaattactgcttggtttgtttagaataatacatgtacagttcagaaaatgaattattttattttaaaacccttttaaggatagtaaattgtaatctttaaatagatcaacttgccagtaactttagataacacgttattgtgaatttcaatgtttgatgattctcttggacttttaattatagtggcttttttttttcatcctttactcatcttcaaccataaatggtaacccacctttatgtaactaacatttacctttatacagtaatatttaccttttcttagtgagataaagagtgtgtgtgtatgtgtgtgtgtgtgtaatgatatggatataagaagatgaataataagaattttactcaaatcctttctatgagtttgtagcccataaaaatgtttaacatttaccaacactatatcttaattatgttaggttatctatcacaacagaataatttccaccaaatcaggtcataacagttcattgattctttgtaacaagaaaaatgttgtttctactttctagaatgggatacttgccctttctagagttctgtaagttctactttggttcaaaagttactgattagttgcaaaaatggatgcagggatacttaaattgacatactgatttgcatttaaatactaagtgactttttaattcaacaatttcgtggccgacttgtatctcagcttagaagaaatctgtcatttggtcattctggcaaagatttatttatttatttatttatttatttatttatttatttatccttttgcttctttttgcatttgctggtggtgttcttcttcataattccattattaatactcctcattcttaatagtatatttctttctattgactaaaccaagagctataaggaagatctttcctaaaatttcattatctaaaatatttttaaaactttattttctatgtaactttttaggctagggagtttaaactgagtacattctttgatgttaatgaaacaccaatttttctgaaggccatgtagccctaatgagcagcttcttataaaagaacatttaatcaaggtttatttttaacttgtttaaacagatctaatagtttgtgctgatttcatttcagtataataattgctagcaatcctattagtaagtcctagtacagggaagttaacacaaattccaatctaatgagagtggtgtcacagcaaaaaccatgtagtcaaggaaagatcagtattgcactggagggaaagaggcacctggctattctgtacatagttttgttgccataagtctttgagttctgagttacttaatgcttacatggaatttactagatttagttaattcagtttcttatggcctttaaaaggcaaaaaaacttaatgaaaacaacacctactttagggggacgttctgagaaaataaattacgttttctacccaagcacattttggtacacataattttcttataataaagcctattatgtcacttagttttaatttgttacaagagcatacataaaaattaatctttaaatgcgttctttccttcttgagcttcagattgaagaaaatgaaatgttactggattacggggcatgtgaataatataactgatagaattaaaggatgatttaagactagcagaatgatggataatttcagctgatattgtataataggataatttttaaaagaggtgacaaaatagtctgattaagagccaaatattttaaataccgttaacttactattagaattggtttaaaataacattgttgatactttagactgttcggtgagtgtgaagatttcattgcattcaaaaatgaaaacaagataagaagtaagactctggtagagaaaacgtacgaaggcaaggatttcaggccttgtaatgaaagtgcatatctgccaagttcaggttataatcttttaaactttttattacttaatatgacacagtgacatttaaaatatggagaaattgaagataaataatatggagtgaatggcagaattgatttaaaattttaaagctgtactaaaagtattctaatgcactgaaggacatttgtaagttatacattgtttataggtttctgatgagaatcccaaagcataatgtattagagcttgcctttgccatgagggcaaaagaatattgtccatagaaaatagtggatagtaaaatttagcctctttttttattcatgtaaatcatctgctttttgtgaaaggtttttatgcataagatcatgtcacatattactaatttcaaccaataactgatatatttggtcttctggaggatttctttatgagattatcatttattgttctaaaaagttgaaattagaataacgaatgctgtgagaactgtgatttttatactctcagtacagaataaggagtactttttcacaatggttttaaaatcttggtatgctgataacttgatgatttaaaagtatcttttactacatttggttaaaaactgtctgatatacaatctactatttttcagaaaagtgaccctcacaaagtgcacatgatactcaaccaaggtgcttgataacaatgtagatttattggtctcatcctggatatacttaatttctcactctaggagcagaacctggaaattcttatttttaatgaagttccacaggtgtttctattgcacacaaaagtttgaaaactactattttagagagagtgcaacacttcataggctaaatggaagggtctatttttggcactttgttagaataaacctagaagatttttagtgtagagtttttatatggaatctttaatgtggttaagaaaaaaaaattataaaggcatttgtagctttaaatatgaagagtatgtggtacatagatgacaaatttaggacatctttcacagatgctgtatactcaaatgaatcatgtcatctggctcaagttgctattctatcttaactgcaaacaaactcacactatttgtactgaatgcttatacaagttgcattctgaatactaagttggcatgtatttacaaatctgagagaactgctatgtttaatgcacaggttgtcatagaaactaattaacttttatttccatgtcaagataaagtagtgtaatacagatgaaaattgtagcaaaggaaatagtatcacaactaagagaaaaaaagctccaagactcagaaaatgtgcaatcaaaatgcgtgatgtcaaataactcagtggtggattgtttttaattctgcaaattatgatgttaaaaattgtacagacagagtccacattttcctagagctgtttaagcaatttaaatggaatttggcaaacaatagatttagtataacatctatcaaacaatgccagaaaagttttccagcttaaagattattctgtatttatttgagctgccttattttgttctacaattacctgtcttttgaattagagaagaaaaaatatgtcatccatgaagctcacagtgtgctcagggctgtagaactgtaactgcaacacttttaaaaacatcttatttatttgagagcaaatattaatacatttcatacttttttccagtcacatttgttgaatatgttttcatcataagaaagcaatacacccttctgacataggccagagaggaaagaaaagaaaggcaatctgtaagaataaagcatgaactttcatcacatcttggcacatcctaaaccttcctacctgcagtaagctttctccctggcctagtcattagagaaatcgacatctttttgtggccttatacttgttccaaaaagtgaggatggaaagtaggtaatctatgagtcatctttgttttgattatggcatgtcttattcaaggagagtgacgatgaaggtagaattaatggtgaagaatattaaaagaaagaggtcaagtaatgtgattgaatcgctgggactggagagacaataatggggcttatattctttaaatgattttaatgagaatatacttaacattctgaaattctaattatatgatagcccatagtactcttaatactactaataataggaaattgcagaattcaatacgtaaaaattaaactttttaaaaatgctaaactttgcctatggagctaaattatatcttattttaaaatattgcttcattgctacttataatatttttaattatattataaaacatattcttctcatcccactgaaacttatacagaaggaaaagtgttaaagggctaggaaaatattatttcatcatttctgttccattagaattcacttgggtggctgagaaaatggtttatggattagagagggaagaacaagctaaaacatttcataccttcatctctgataaattccccaaactcattctttgcatctgagccataaataacaaccatgctttttgctataaagagctttttgcctacaccaggtcttttgtcttggagatgaatgctataataaatttggagtcttgggggggcattgtttgaactataacattatggtttacaactgttgcttctatgatgaggaggataaaaagcgactgtgaagcttgatctctgtcatagaaatggattaatatttcagtcttcaatatgggtcaagtgtatgattctccccaaagcaattcaccatgattaatttttattatgtggtcattcagattctctttatattcttagatattttattcccccaccaaatcgccccttgaaatactataacttagatttttcacataatagcagaaacacaagatttttagattcttataacagttttaataaaacctcatggaagaaacctctaaagtgttttctcaaaaattatatgaataacttaaataatagtagaaacttaaatcattatattgataataattaatattaacttaatttattgataaacagtgttaaatatatattaattgcaaagtaatatgatgttttaatttgccaatgactaagtaattaattattaggaaaatgtactctgtcactggggaaaaaatggcagttgcataaagatgtagcttttaaagtcacctttttctgaggagaggagggtgttaactaggaaaacaagacctctctgttgtctttgttatctttatctagactatagtttttcacatatatctgcaagatgctaatgagtttaaaactttgggggaaaaaaacttttttggcctttaattaagtgagagctttttttttttaagccttttctcaggaggaaactgacacattttatgtgtaaataatttcatgtattgaaattgtttttttcagtgctttcattcctccctttgccctgcaaaatttaaggaacttcaagatattaattttcagtgcttacattaagaattcctacaaagtacttataagagcaatcaacaagtcttattcaattatttattttacaagttattgttggcagtctactgactgccagtcatgtcaattgtaaattgaagggagccatgaagctgtgggaagcccaaacattccctacagacaattatatggggagaaatagttacaatcactgggatcagggctaatggaggttacattatgtttggtacaactatatataatttagttttgctaggcagtaggtctcaaacctggctacaccttagaaaaaactgggttgctttaaaaaaattctgatgcacaggcttcaccttaagaatctcaagagctgaatgaagcccggccattggaattttaaacatctccacaagtgattatagattctaaggtacttaaaggctacaggtgacaacctgaagagaagagggtacagatggagaatgagaaggagaggtgagtaggaaatttaggggaaatagtaaataatctttttgaggccaggcgtggtggctcacgcctgtaatcccagcactttgggaggccgaggcggacggatcacgaggtcaggagaccgagaccatcctggctaacacagtgaaaccccgtctctactaaaaatacaaaaaattagctggacgtggtggcgggcgcctgttgtcccagctactcaggaggctgaggcaggagaatggtgtgaacccgggaggcggagcttgcagtgagcagagatcgcgccactgcactccagcctgggcgacagagcgagactcagtctcaaaaaaaaaaaaaaaaaaatgaagaagaagaagaataatccttttgagcaacagcattagatttagaccgactctgtttcacatcctggcttggtcattttcttattccatgactgtagatgttagttgttatggaaacattacttataaaactgggggtcttaaatctcacttcctaggattgctagaaagagtaaataaaatagtgtatgaagacatttcaacagtgcttggcacatcctatgataaccatcattattactgtttaaagatggctggagaaatgggcaggaaccagataataatggctctcatttattcttgtgtttagatttttatcttgaaaagaatgaggaaatatggaagatttttaagacagtacattacataacaaaatttgcatagtataagtaagactctagcatcccattgtgggacaaattggaaagtgtactacaaatggaggcaagaaggctagttagaagattattataacagtccctgtggaaaataaaaagagcctttactgaaacagtgaccacaaaaatggggaaaagcagatggacgtgacagtgcctcaaggggtagaacccatggaatttagtcacagattagaagcttgtgggtaggcaaggatagatggaacaggtgaaatcataagttaatgtcttccaaatgcctggtttgtatgacttgatggatggtgcaacaggaagggaatacagaatgaggaaaaagataacaaattcatggaaatgttgcacttgagataacggtagaataatcaggggctggtatccagggttagtagactgtattggtatcagtggggacccctgcttacctcacttgaagattggaaattggaatgaatggaactttctgggtataaggattttgagagacaaggaagagctaaagataaaatcttgagtaatatctacttttaggaaagagtggagaggaggctttgaaaaaagggaagcatggttaaaatgtaaaaagacaataaattacattgttttaaagtccaaagtccaaagaccaatcgtatatttcaagatgtaaacagttgtcaagatgcctaagaaattaatctgcagaagagttctcctaatggatatgtcatcagatatttaccacattggcataccttcagattgtaaaagtaaagaagtaaaataagagcttttgcattgtgcatatatttattgagcatgtactttgagcacagcagtaggccaagcaattattagatatggggagtgaaaacttacgagacttataccctagtgaactacatcccaagacaaacagcattctgagacttcatcactgcttccacttatttttaatttagaaattttgtgggctgtttatgttttcttttctttgtgcctttattgaatactttatctcatttataacatttatagttttatataattaaatgtattataattcttttacaatttttttatcctaatttaaattttttaatatgggctctcactttattgcctaggctggaatgtagtggctgttcacaagcactatcatagctcattgcagccttgaattcctgaagtaatcctcgtgtctcagcttcccaagtagctgggactataggaacatgccgtcacacccggttaactgtactgtatttctttgagtatgattgcatgaaagttttccaatccctataattaatatagcataagttagagctagagaccttaaatgttgtggtgagaataatattagttaaaaatgaagtgcacataaaggcaaataattattgttattatttataatgataatgatattctttcttatatcacccatattttagtgtcataaaccctgatatttgctctacagccatttatatttatatcctggtacccaagattgttgtgcacaagttgatattcaacaaatgttcgttaaaaatacagataaatgaataaaatgttttgcaacatggcataaaggtgggcattttgcccctggatgttattaaaaggtgagtttgtataacaggtccaacagttgcattaaatctgcaaacatgtgttaattattttgaccagtgttttctgctgagcatgtgcctttataaatgatatttttgctactttaattttaatgatcgattaaaaggtttactaattgcaaatgaaatcttctgtaaaaaggaatataaatggaggaatgcagagtctcacattaagattagaaagccaggtgcagtaatgtgcacctgtagtcttagctacttaggaggctgaggtgagaggatcacttgagaccaggaatttgagtttagcctgggcaatacagcaagataccatctcaaaaaaaaaaaatcagggaagagctttgataagatattaaacacataaactattccaaccaaacaggctgaaacacagtctgatctcttagcttttatattttaagtaattatcatggggtttgagcatttgtgatcagaaagagatcttggaaataatctataacaacacctgtaatatcttataagcaaaaatgagaggcagtgtagcaaactgttcaacagcacagactttggaacccaactgcctgaatttcaaaagtgactttgatacgtgaccaatgatataaacctgaatttattacttcatggctccatgcctcagttttataatctgcaaaatgaatataaacatataatacttacttaataaagcagtcataaggaatcagtgagttaatatatgttaaaatgcttcaaacaaaactagcaactaaataaggtgatatatacatgtgaatgttgaggatgaagattatgacactgatctcagagagtgttaagataccagtcaaagcaacatacatgggggattattccaatatatggtgtcatttaaacttgtcttcccatatctgtggtgcaagccgttttatatgccagtgatacgtcacttatgtttatttgcatttttacatgacttggaatgactgagaaaaaactacattattaaattggtccaatattaatagtaccaaattttaaatttgaaggtaaattttgaaggtagtgtatctaccacttagatgtacattcttttttttttttttttttttttttgagacaaagtttcactcttgttgcccaaggctggagtgcaacagcgcaatctcagctcactgcaatctccgcctcctgggttcaagcaattctcttgcctcagcttcccaagtggctgggattacaggcatgccccaccatgcccgggtaaattttgtgtttttaatagagacggggtttctccatgttggtcaggctggtctcaaactcctgacctcaagtgttctgctcgccttggcctcccaaagtgctgctcgcctcggcctcccaaagtgagccaccacgccggacctagatgtacattcctaaataattttttattacatcatattcatcattttcttcatatcacttactcatatgtgacattttcttgctcactcatttgttcagttgtagagtaaatccaacatggcaggaactttgcttgtcttttcacacctaaatgtcctagtccccagaagagggactaagacactgtaggccttcaataaaacatattgggtgaatgaatgtcatagactgtgatccagcgatatgggcttggcatgggggagtaagtcgatttaagtgatactgaactgatagtgcatttgtatacaatacttgactcaagttccagcccctaccttggaccagttattttacctcaccgagtcttagttttctggtctgtataattaatacaattaacataacaatacagactttgaggttgtagtgaggaaaaaaattagttaataattaagtatacatagcaggcactcaattatcaatattattatcagtattgctagtaacactcctagttaaatcatccacatttttgatagtttattaatataaatattatctattaaatcacccatgttttagatatatttattaatgaaattaataaaatagtgttgacaatatcacatatggctttatcttgatagtaatataaggatcccctactcctgattttattatacaaattataaacaccatcaatagtttaagtccttgcttatcaaagtatggctccaggaccggcagaatcagcatcaccagtgacttaaaaatgttagcatccaggccccattccagacctactggatcaaaacctgcatttaacaagcttccctgcctgcccaaccccagatgatgtgtacgcacattgatgtttgagaagtctgtgtttcaggtgatatttttaaaggctagtaagtatttaagaatcccataagaaagggaaaaatgcaaatattcctcactaaaacaattcatctcgcttcctacttgacgatgattttaggacaggagaatatagtattgtaaaattgagaggaaaagagaagaagtttatagttacaatctacctataggaaattttgtcttattgcataacatggactcccttttgagtcagcgcttataagtacaagcaaaatggtgctattatacacattgtaccctctgccctatagagtgaattacaaagtgtgaaaatataatgactactaccgggatatttaataagaaggataaagtaataatttaagaaaaacgatttcctgagagactaaagattaggattaaaatgagagttagaatagcatagaggtaattcaacatttgattaaggacttaatctacttatctttattcaattcaagcttttttttttcaaattattaaaatttggtgaaatgagagttatttttagatgttcttgccccggagtaaaagagtagtagatagaggatataaggacatacaagatgaaggatttaagataacattggtgatagagacaatggattatgaaaatgatcactttatattctgtaaatttcctgaattcaaaatgccatatcaaaattctctgatgtttatgaaaaagaaaagttatagtggaatgtgctaagtgtgtggatgatgggtagtgaagatgatgatccccatgaagagattggggtgaaaaaccaagagaaataaagagagagagaaaaaagacacatagaattttgataactgaattgtatttggaaagataaattggccaatggcactgaaaaagaaatcctcaccactacaacacccttgagttcataaatatgccagtatctattttttcattattagtagacaaggctgtgtcctttcctttgatgacggtaacgagttctatgacattgccactttgagttcttgcttcattagattgggtgactgtttatttgaaattgtaatgaaatatttactttatagagctataaggattaactgtgataattgagtgaggctgatctggagctttcagtgtaataggtcccccttgtttgaatacagagcgcagtgagaatgaacgagcaagtgagtgtgtttctgcctgtcactttctttctacatgttgctttttcttctggagataagtgggcctaatgctgaacaaatactggaaatcagaagccactgagaatcattcgcctctcgctttcccatggcagcatgatagacgctcaatcaaagaaccccctcctctcagcaaagcaacaattttgtcaccacgagcaaatccaattgaaaagtcccttggactgagaggagaactccagttgtcagaatcagcaaacagaatgaaaagaactaagaggagtaaattggcacctggggccgccgtggtagcctgtgataggctgtggcattgtgttgggtagacattcagccattttcagatataatgggagaaattaatgcaaatgagtcaatggaatgaaatgcattttaatgcagatttgagggactatcctgaactgcttgataacaagtcgctttaagaaaaggcttacattgtgaggactcattttttccccatttcttctcactagtgcctcataagggccctttgttctctaagtaaactctttctaaactattgacattgctcatttatgtgaatttcagattttttttttctccctgacaaagtagccttgggtgatctgggaaaacgttaattgcaagaggacaaggaaactggctgaaacaagaaatgcagtcattaagtgtaatgttgcagttgtccatgcctcattataacatgcatacaaggcaataaaatgcatgtttcacaaacaaatcttttgacaactatagttcaagagcctccagctgtcctgcttttttacatctatttctcttggtttagtaatcattattgaagctaaactttaaattcccagaacagtccttcatattatgcaagaaccatgaagatattagagttaaaaattgtttactttaatatttaaaaatatttgctttccaaagttaactggaatttctcactaatgttttgttttgaaaatgacacttaataatagtgagggcagcgtgggggttggggggaatgaacttaatcccaaaaaaggcactcttttataaaccaatatttaaaatatttagctcccttaggctgtctttccatgaagaaaaaataaaggcttcatcttccacatttaaggtcatgatggtttcactggactataaatgcctatcttttttttttagggacaaaaatagttaatcagatgaaaaggtcatcaagtcttagtgcagcttaaaactggtgaactgtcagactctcaagtaaaagcagccagaaaggggaaaaaaaggtaacagattcagcattgtccaaaagttccagaccagtgattaatgtgtaagataatggacttgggaaatgagtaaacactccccatgctccctgctttgtgcttgaacgacttgatgacaagggcagagcaaggtgagaatttaaacaggaccacaggaaaaaaaaaaaaagacaaagactggcaacaacataatgcgagggagggggagtttactggtttgcagtctaaaaggtacataataactttcttcaaagcaggccttaacagtgtactaatttaaacttcaacatgggcatggaattacccgtagaaattatatgccactcagtcatcttttaatataccggatatttatatgtacttgttttcatttatttgttgttaacttccttcggcagacccattaagcatttagatacatatttgtgttcagatgtatcatcctcagggaaaggagatgctgtattttgattaagtggtgcgtttcaaggtatttcaagctattcttaaataattatataggcacattttagagtattcctccataaaaaaatatttgaggatctggatgccttgctagctgtcgcactgcatttcttagcaatctgtcatcacttgaacttacacttttcttgatcacattgaagaccttttatatgtataaaacatttatttactttgaataaaacttgttttgtttccaggttctcactccctgtatttctttagacacctacagaggtgttttccagggatctctttttataggatcagtagcttaaacatgttaattttgtcagtcttttacataaaaatctatttctgctctgtcaatctgttttaaatgcacacatcacaactgacacccactgaggatttatttgtctctaaaaaaatcctgacaatttctctggacaaatgttacccatcaccttaaacggtgcttaatgaactttgagcaatggccatggagagactgtgttcacagccctaaatctctatattgttgtcaggtaatcaagtcttcggtggtcaatttaaaaatatttgaaattatcatattggttctgaatacaatattcatcatttttcttttaatcatagagaggtttgtaattatgtttatgtatattttgtaaattaagtccataatttaaaaaatcttgatattgcatcttcctaaaggcacttcagtgattcaaccctgaaaagcatgataatacagaaatgccattgtgattatcaacaactggattgctactttcaaagtacctttaaggccaggcgtggtggctcacacctgtaatcccagcacgttgggaggccgaggtgggcagatcacctgaggtcaggagatcaagatcagcctggccaacatggtgaagccccatctctacaaaaatacaaaaattagctgggcataatggcgggtgcctgtaatcccagctactcaggaggttgaggctggagcatcgcttgaacctgggaggcagagattacagtgagccaagattgcaccattgtactccagcctgggcgacagagcaagactctgtctcaaaaaaaaaaaaaaaaaaagtacctttaaaaattctcttggcttttcaacaacagactggtgagattggcattattacacccatttctgtgattaggaaaaatggtccctacagaggttaagtgatttgttcaggttagacaacaaagactctacagagccatttggccactggtccgtttattttactaaagctccaaagaaaatgcctttaaaaaaatcaagttatttccttatattgcttgtgttctagtgcttatggcatttagggtattaaaacagtttttcttaatttttcttttgatcccaagtcttgaattactatgtattgatttaagtgatattttaacatttaattgaatgcatgtttattatgagttactgaggcataatattaattattcaagctaaataaactatttttgctttatgtcaataataagccctttcaaaaatcttcaaacgtgtgttacatttttattaggacttttaatacatatttctcatgttttatgcattgaattgtacttaacaaaaatcaaacagtcacagtatatgagttttttgttacaaatttgttacgtgagccatcgtttctcctgatcctttacattcactatgtcattctcacaagtgaacaacatccaggcaagcatatatcccaatttgacgtctctatgataatcagatattcaattctgcttgatttaaagcaaactttctatatatactgagagttatgatttttcctttagaaaattgagtggatttcaaattttgctattaaatatattttgcttctaaaaatctgaatttatatttctactctaaagatgattgttttgtattataattataccattttatatcagtcttcctcattagactgtgagttcatccagttagaggaatcctgccctatctatcttgacctttatttctgtgattgccaatacagtgtccaggacatagctgccactcaacacagtatcttttaaaataaaatgtttttttttttcattgttttgaaaacaaaccctaaaccataatataagtcctttcaatattctgagaatgttgaattataagttttaaaaggataaatgagggtggatgttcaattctctgaaccctggatttctaggaaataaaaatgaattcctggtagatggggtctaagtatacttttaaatgtcttggccgggtgcggtggctcacacttaggtaatcccagcactttgggaggccaaggcgggcagatcacgaggtcaggagatcaagaccatcctggctaacactgtgagaacctgtctctactaaaaatacaaaaaaaaagaaaaaaaaattagccgagtgtggtggcatgtgcctgtagtcccaggtactcgggagactgaggcaggagaattgctcgaaactgggaggcagagattgcagtgagccgagatcgggctaccgcactcctgtctgggcgacagagtgagacttcgtcttaaaagaaaaaaaaaataaaaaagtctttagtttacgcattttagtctttaaatttaaataatttaaattttctagccattactttaatatttaacattttttagtattttttccataccgtctcagccaataaattaatggtctatgatgaatattctctattattttggtatagtatcataagtttaaaagtaatggtttccatatatttgttgctaatgctgtgattaaaagaaatacttttagaattcatgtgaaaggaagagagtaggcaagggacagacttgatttagtttgaagacattatacaagtctgtctctattcttagatagtaatttggggaaagtagtatcccatgttcttaaagatctatgtgaagaaattgatagctacatcatttcctcttaatgtactgaattaaaagttaggatacatacctttcagactaggttctgctacttagtagccctggaactgtctgaatttcaggggtgccatttgcaaaacaagacaaattagacctaacttaagacttcctagctctaacaataatcttgggaccttgggacattgactgcagaaagaagagatttaactagctttggtcagagcaataaaattaacaccagtttcgtcgggcccactgatgtcacaatttaaacttgaaagagagttctgtgaaaatagcttttcatcaccattgtttttctgattggggtccatgtttaaatagctacctgtataacagccttgtattgcagctttaatatccaaaatatctttttttcctcaactcatgtgtgatatattaataaaattctcataaacagatttttcttgttttgctatacttgattgaggtctgctataaaaaattaaagctactaaaggtggggagatatcggcaactctgttgaacactgctattcagtattagccaagtggagtgtttccaggcaacatcttagtatgtagaatctaccctgaacatgataaaataaaactcatagacaaagttaatgatttttcttgttaattttcaaagagaagatgaagagataaagtagtttatgatgatttccccccggccccggtctttttgcccatctcctggataaaaacagaatgatattaaaagcgatgtgacccaaggaagaaatgatatttaacaattcataacatacttgccttattattctacctctttgttttttattagactctcctgcaatgcagtgaatcaccagatagtggcgttttttacgttttgcagagttgtgcgatatatttgtgcctttttttttttcctggttatgtctaaaagatataatttggcctacatttatctttaatggaatattttttgagaatttcatgaaatactttaggaaatgtgagacaccctggggtattacaaaatctgggctggaaatcactggcccagagaatggttactaaagtctgacagctgttgggtcaacgggctaagccatttaacctccataaacctcattttcctcatctgtaaaacaaaactcttagtgctgacctacttcatagttcaggttggcagcagctaggaaaatactgagagtcatcatccccttgcaaagtatcaactcccatatcttctaaagactgtacataccatagtacagatacttgattgcatagcatgaaagggggcaaggaaaggtaaattattatttgtagttggacaggagccaggaagcatatctcatatttttagagatattaattgggagtatctatatccagagccatggccgatgccagaagggaaatgggcacgatcagagaggaagcactaaccaggtgagccagctgtgaattcctccattttaaagcactaatagaacagtctggaactttgcttgaggaaatacatatttattttgctgaaacaggatatgaaaaaaagagaaaatggaggaaaataaaagtaatactccagtggatgatgtatagagtacattaaaaaagataatcatgagtcacattaagtcagaattaagctgcttctgatttagtatgttattttggtttctctttgcatctgtggcctgaaccaattaaaatattttgaaacaataaaacatttggtcatttatactttgactatggcatgagaattactctatattacttttgtatgatttgtacacatggcaactaatatttcttgtatagtagtttacagctcttggcagctttaggggtagctgatcacagtgactttggttttaaaaaggaaatatggaataatccaaaaaagaataaaccattgcagataattgagaattgattatatttcacacactcaaaatgtggaaagttctaaagtgctcttccacttgcgaagcaagttaggtaggctggtagtgaaatattgagggcaattttcttcatactattactggaacagtgtcagcaaggcaatctatgaatgtttgtactttttcagacctggatatactaacttcgttatttatatatcttggtaagcgataaatgaaaaaggcatttaaaaaacttgcatacttctttaagtgattacatcttcaagcagatgttaaaataaggattagcctttttttgcatgtgatggtgcacgaaccttttaaggaatctgtgaattattgctttggttcagcaggagtgcagtaagaagaaatgtacctcatctgtaatacactgtgtagactaatatcagctccttttttcttatattgcagcgagatattgatctggtaaaatggtaccatattggagctgtctgttgtggtattcatcatgctgtcacatccctagtgccttgaagttattggaaagtggaattgagagagttctgtcatttggtgtggcaatccattcacaggacagtcactacaatatttgcagtggttcgcttatttttctagccaggatagcttcacctttagtaacaagagggcctttctattatcccatgcatagtggtattaataggttaggtttaactcttctctggcttgctttccttgtgtatcattgctcttttctagtcactgctcacacctgctgcctgtcctgatgctgatgtattgggcttatttctgtgggactagtatatctgaactgtgacttcaagtcccttatgcttttatctgacggtggtgagaaggcaaaagatgaacttttatatgtagaaagctttagtttcttcacacactaaaatatcagttaatgttaaaagagctttcaaaatataaaaagatactgtcaatcttcaatgactagattaaggagtttgaatgaattatttttgttttggattcttgctggcaacctgatgattttagtagaatgtcatgttttcttaaaaaatcagaaatgacagattttgtttgggggaaataattattatctactaaagagtgttaaagtgtataaagtgttgttaatctttagaaagatgagttcctgaaattccaagtaataataatttcagctatagctaagtaactgagcaacagagagagagagagagagagagagaaaggaagagagacagacagagagagaaagagagagaatttcctggtttgtaggaatttaaatgcaattttaaaagttgaataatatcaaactaggttactattttgatagacactaatggaaaaattatggctactagaaaccaagactatagttctttggagaaagtatatttttaaaatcaacagttgaatagaactaaatatgcaaatatatgatgtatttaatgtacgattgtgcactattgttaatacacattcacagcatgcactgtaatagctcagaaggagctttcagagcatttatgagctatgacatgcatttatattgagttatccgtatgttttctatgctaatcttaaaaatgtccacttatttgctgttgcttcaggaggattaaaacctctgagaggatggcatttcagtgacttttctattctttcattagtcagtatttttgtttatatcacacttactataaaggaaatactaagggactcacagaatcaagagagattttttaaaatttcaataaacaatgccataaattgggtgatacataatagtagaattcacacataaaagtttttaaataagtagcaaagcagtaacaaatattgatcacaaggagtgtataagtttttgtagaaatactaagttctcatttcagtgacatatttggcttagtttgcattattgcttaatatgagatgaagcatattattttaagaggtgagaaaaccatacaatctaatattttgttgacatatttttctattatttaaaattgttagttttttactttttactttcatatttactcttactcctgctagatatttttcagaatgtattttcattttagatagtttactcatactacatcttacatcaggacatgctagaggtgagggtttatttctggtgaatcaacatgtaagatgtaattataaaataatttctgtatcccattaagaatttagatcaacaatatcttcaattattagacagggcagaattttgcaaagccattattgtgctcttggtattcactagaatggacagaaatagaacatcactgtcctctgtaaacagtttcaatttgatctgtgtacatgataaaaatcttggcttctcaatgcatttaggtgctgtcatagctgttgttgccaaataagaatgcagtgtgatgttattatagtaaacagcacttaagcacagctggcagaattgatcagggccacattagagtgaacttcaacagatgactgacgcagcagaaacaataactgaatatgcaaacagttcttgcagtgaatgctctggggatcaggcaccattatttttgactttgaacagggaaaaggggcagatttgtaacctccttccatacagaagggttctgggtattatgtaaacatctgactgccatttataatgctggttagttacaatgcaaaactgaagcctctcctgactatttacattccattaattattaaaggagaaaaacataaacatcagataactttgtttaatgtttcacataggatttattttttttagccatcttttctcaattaatgttagtcatcaagaatttctggtttaacttggacaacaatgtgtgtgtttcattgatggctcccaccccttcccctaattattacaagagctaattatgtgaactacatattgctgttttcttattgtaatgattgaatcattaaaagtaagcagtgtagaaatattagataacatttattcatgatatttcttttattcttggttttaaagtcaatttctattttgctaataactaaaaatatcaaaaagccatgcatggtagtgaggacaattaaattaaacaacactttcatttcctagttcagcatttatttattgaattctaaagaaacaatttgcactttaaagcaatattaaacaattattcttataatatactctagctaagacacatattaaatgaaatcatacattagattgttattaaagggtacatttacttgaaatgctaacttttctcattctttttgttagacccttaattctgttgtcattcattcatttgctatgtgaatttattaattaaataaacacagatgtggcatttttgcggcagtgtaaggtacagtttcttagtccaaggattagggaacaattcaaaaaaagcaattattgcatggtagggtaagtggttgctactggcatgcaaagagagtgtatttcaagaagctcaggtatttcagggaaagttttctagaggagatgatgttaaagtatagactctaaacatcggtatagtggagtggggaggagaagcaggggaaaggaggatgttccaggcggagaaagagcatgagagaaagcaagctgttaagagtgaatgtgacagaatttttgaactctgtatgatatttattcccaacagagtacctggcacatagtaggtgcttccataaatagttgcttgaaagcataaaagtttgagataaagacaagtgtttgtttatttttgtctttaacttggctttcacaactggtggtccctttcttcaatcattcctctccggatcctcagctctccgcttatctagctcttacctctcaccctcatgatgcttgttttcaaaatggagacaataatgcctatagcatggagttgttgtgaagcttggagatgacggttacggaactcgtgttccttagtcgggttcacagaatggtataaacgactaacagtttcccaagtgttgttcctctctacaatattaacatttctttagtgcatcatgttttaaatctgagggatgattccttaattgtgcacttaagggaatgcctgtaattttctcatttgaaagaggctgaaaaaggtaaatttgtcaaaatattagtaataataattatgtttactgagtactgactctgtgccaagcactgtgctaagagctgggatttgcggcattatccatcattcatttggtgtatcagcccaggttttatctgatttgttcaactttttcttaacaaatgcccccccctcaaaaaaaatctagtgtgttctcaaattatacattaaatagaaattagtcattggatatttttaggcaaattaaaatcttcataatttacacacaaagtgcttggattttggattggtgaacagaaaaatatagaaaatagggccaggcaaagtggctcaagtctgtaatcccagcactttgggaggccgaggcggtggatcacttgagatgaggagttcgagaccagcctggccaacatgctgaaaccccatctctactgaaaatacaaaattagctgggcatggtggcaggcacctgtaatcccagtgactcaggaggctaaggcccaagaatcgcttgaacccagaaggcagaggtggcagtgagctgagatcatgccactgtattccagcctgggtgacagagtgagattccatctgaaagaaagaaataaaaggaaagaagaaagagagagagaaagaaagaaagaaagaaagaaagaaagaaagaaagaaagaaagaaagaaagaaagaaagagaaagaaagaaagaaagaaagaaagaaagaaagaaagaaagagaaaaaatattttttatatttcaggtaacatagagaaaaattagtaaaatctaatcatgttatgaaagatgatatattagttaagaaaatgtcccatatgtttttgtttttgaaatccttacattattatctgagctaacaaataggcattgttctttgaaaacatgaaaagcagacttccagttagcttatacagggcagacacctcaaggccctgggaatgaggattgctatagtagtagacaaagagggacctgttgacctttattcaatggtgcccccagagtgagctcaagggcaaaggatgttctggggatgatggaaaataagcaacaggaatatcattctagcgaagcaagcagaccctccactgggttcccttaaattgatttctctttttaaaaactaagggcttgagcttgttttattccatctgtaaaatgatttccaagcacttttttatctctaagatctctttagctgccactcactgtgatcagttttggccttatgaactgaagtgtatggtctcaaagttgtattccatgttactttatttatcttagataatatcccctaccactttttgctgagcagagacaatgttaccctgcttcactttgctttccccccctcaacattgtttggagcttgctccttttttttttttcagatcccaatattaacagagcatgttcacaacgtgttaatctgtgtgaatacatttgtaaagctggccagtaagtaataaatttgaaggttactttggatgggaaaagtattctaactgtacttaatctttttatagttggaagtcaacatgctgtcccccaaaggtctctccatattgctttttgcttttcaccagattagatggtttatttgcctgtcaagttcatgcacaaactgggcaagaccttcctgcacctcaggaatgtgagaatggaccagggtggtctccaaagtcctacctatcggtcctgagaaagctgctacagtgctatacagggacccattaggacacaattcattaaaaattcccagagaaaggaggctaggatggcagaactcagatttccttgcttcctcccatggacccagtagagacactctcaaggtaaatgtagctcccaaatttatctaaaacaaacatgtagtgaggaaactcacagaatctcctagagcatccttgtatggaagccagcctgggcatgacatgaatgcatttttagctgggatgcctgattttcttttttctggcagggggatggagtctcactctgtcacccaggctggagtgcaatggtgcgatctctgctcactgcaacctccgcctcctaggttcaaacaattttcctgcctcagccttcctagtagctgggactacagaaatgcaccacctcacccagctaattttttaatttttttagtagagacagggcttcaccgtgttggccaggctggtcttgaacttctgacctcaagtgatccgcctgccttggcctcccaaagtgccaggattacaggcatgagccacgacgccaggcctgggatgactgattttaattattttttcttattaattctgtacagtgtgtggactacattacattacagtgtgtggactacattacatgatctagtattaactctcatcattgtgaacaattttgaattgtaggtaatttttcctataaaaattaccgttcctttgcagaaaatagatattatatatcatacaactatttgtatatacaaacacaatatataaatacataaatgcaaaaatagttgatagatatagctattatgtgtcagtacatatacatatgtgttaatacatatgtgttactacaagattatgtgttagatattgtgttaatacatatacatatgtgttaatacagaaatgtgtactctatcaagctgaatatttttggcaggaaatatttaccacattgtatttttagtatatcttaaaatatattaaaataaatacattcactaagtcgacatagctttgacttatacttagtgaagacattagagaagtcctagccacttctgggaaggaacccagaaacttctctaaccttacatgagcaaccagtgaaggctggcaccagtagctcataagcttgattagataacacaggtagcctgcagatactgtggaggttttttgtttgtttgtttgtttgtttgtttataccatttcttttatcagagatgctaacactgagcacagcaaagaataggttgctggtgctctgggggtataagaggattccaaacaggactttagtggtaaggaatttccagtgacctgggaatttttgtagttgatttcatcttattaaaatcattatgccttttttagtgccacatttaaaaaacatattgcagttaagtgagtttacttttcatcagtgaccaaatctgaactccaaatgtgattgatttttgtattcttaaactctaagcttccactttgtcatctataaagggaagagtttaatttcaacattttcttccattcctatctatgggtttcctcttcattcatgtatattttggaagaatctttcttgtacatgatgttgtttattattttattttattttatttgaaacagggtcttgctctgtcatcaggctggagtgcagtggcgcaatctcggctcagcgcaacctctgcctcccgggttcaagtgattcttctgtctcagcctcccaagtagctggggttacaggcgtgtgccaccacgcccagctaatttttgtatttttagtagagaggggttttcaccatgttggccaggatggtctcgatctcttgacctcgtgatccacccgcgttggcctccgaaagtgctgggattacaggcttgggtcaccgcgcccggccgcattatgttgtttattatgatgtaacaattacttttaaaaaatattgtcttatctcttagtaagtatagataactctaatgttttgaggtgtagtggtggaacatggtaacccctctaggtattttccctgcaaaagccctgcagttttattgggattgagtacaccgttttgtttgcataatggcagttctcagtgtagtctcactccagttggtgaaatgtaaagcaccactcactttgtaacattgtcttttgggcagaattgcacagttatacaaagcagttacatgatgttcttgtttggtgactgtttctccaggaagattcacattgaattatttcttaatctcgatgtcacgttttgatgatacagcttagttggtggaaacctgaaatctgtgaagctatgtttcatctagccttctgtgccatgccattgcaatttagacatccattagaatttatatattatgatagtataatgcaatttgcatattcaccaagtagcaagaaattattgcttttcttccctttgatgctgtgaggtcatatctgacatgcatactaaagtttggatgataattatcttttggagatgccattactgcagagcatccatttttcaaaggtatttgtgtgcctattacatatgttctcatgataatgaacctgtagtagaactttaaaagaaaagaaggggaaaactaaagtggggacagatgagttctttaataactaagagatttgtggaaagaaatagtagacagagagacttattttgaaacaaaaaaaaggaatgaaaacaaccctttataatattcagtgtcacatagtctacaacctgattgtataaatgtggtttcatttgattttcacagcaatctgtaaggcagatgatattattgccactttatatatgagaaacaatattccgagatatgaatttgcaaaaggtaaaagaataaataaaaagccacaaaacttctgattctaaatctagtattcttttcaaccaaaccttgctgggttgcttatgtagaattcatgtttgactcccaagacaaaactggtagaaggttaaagaaaaattctagagtttgctaaagcatatatacacttttaacctatgatgtttcatgaatttaaaacaattatagaagttcctttcctttttgtacggattctcataaaatcatatgaaatttgatttatagttttcatagaaatgtttaaatcccaaccaaagtgggcacccatgtgtaatattcttccaggatagttgttaaatatgtgattgcatattcttagcagcatggtcttactgtttggctacactaattgtaagagtttttgccttcttgtggaagtaagaagtgtctgtttgttcctggttcctatgtggataggccacactaattcccctactgcatcacaattcttcagaattgtgataggaaagatacttctggctctaccgtcctccaggcaggatatcaccatacctttagtgcttcctcagctacagctttcagattttacctctggttgctttctagtttgtgtatgtctttcttgaaccgtatcaggcataagctaaccaatgcagaagatggtgagaattctaagtgccttatctgggacactgtacttcttttcttgtaaacttctaaaattcatgagctatatttctgcttcattgctgaattacaatatgttatgaggtagtcagtttatccattgattattatttccaaatcatcaaatggttcaacctttctttgttgctttttctactatttagggaggtatctgtaactgcaccaagtcaatttattaagtgcaatgcttttagtaaaatgacaccttcaacagaggtcaggacagtaaaatttccttatttacaccttatctgtcctctgtggtgttgaggtttgggcatgagaaccaaaaaagtaatttggttcctttgttatattttcgtttttactttccagggttgggggcttttatcaacctgaaaaaatctttctataaatcagtcgactttcaacataattaggagaagctgagatgacatggaaataaatatttctgcaaagggattcagtcattttatttgaaaaagacatgaaaagttcctttaaaatataattttcttttttgctaacatgaacaaattagaaaactttttttcaaacattcatatcaatcttcctgaaacactaatatttataaagccataaaatctgtttaaaggcaattaggaaacacaaattgtctaaggaattaagtcccacatctcttacctggcataggatattctccaaatcagattcattcctggcctttgccatttatcagttcaagagactttagcaagatactgaaaccctctccattttcttatctctgaggaaggatgtatctacctcatagagttgtagggactgtgcgaaaaagcaaaacctttagcaaagtgtgtggctccttgtctttaataatcagcagtcctgattctgctgtatagaaacagcaacccttgacttcagacagaccatgcagtcttgtcactatttctcaaatatactattaggattctatttccatgtatcaactttattggggtcttctgccatggcttttccccccactctgttccacatatctagagtgtgttctgctttggggttcacaaaaaatgtattccctgattattcctccctttagtgatctgtccttcttttggcattcacatgacaagtttgccaataattttggcagtgagttaagtgtattatacagccttgcttaacttctgtcttctggatatgtatgtcttggtctctatgcaattggaaactcattctactatgtccatcatatcactgtgtaaataccaggacttcagtaatggttatttaattcaaaaagttgtccaatcaagaagtcagtgttttaaccctcacatatgttatgtgactttaggggagaaactttaccacaagattcataaatttctacagagaaatagcacatggaataaaaattattagactatctttagagaggagatgctgagtaggaacaagagaaaaataaaggcagattttgcttatttaagttgtctatactgatccctctgcaaactgacttttgggaaatccttgaggtaaaaaggaagattgaaatgtttccagtgtcttagaaaaaaaaaatgtataagatgaagaagatgatgttgaaatattcccaaggtgacatttagaagaggctgcaattctgcagacagcagaaatccctttactaatagtaaaacatatctttatttttcattgacacttctattttgcagagaaaactacaaataaaacatttctttgcatttttcttccttttttttccccaatggagtaaatatgaataaattttaggaatgtctcatatttaactaatgaaatttttgcttgatagtggttagaacattttacatgttataatttcaacattagtatgatatttggagggacaagaagaataaaaaactggtaacgaccattgatatttagaagtttaactgaggaaaattagtaacaaattaaatttccatagcatatcagtaaaaacttgggttccaactaatctgtggggctatgtattagtctgtttgcatgctgttgacaaagacatacctgacactgggaagaaaaagagatttaattggacttacagttccacatacctgggtagacctcagaatcatggcaggaggcgaaaggtactttttacatggcagcggcaagagaaaaagaggaagaagcaaaagcggaaacccctgataaacctatcagattctgtgagacttattcattgtcattaagaatagcaggggaaagactggcccccatgattcaattacctccccctgcatccttcccacaacatgtgggaattgtgggagatacaattcaagttgaaatttgggaggcggcacagctgaaccatatcagtctgtattatctctctttttttctgctttaagtgactatacgtaggtgttgttttcagggattatacataggtattctgaaagatggggttattttctgtttcattctttgactaagtggcttcttttgtccttatgtgccagaatagcctaaaaaatgagagaaaaatcactcaaatagaattaaaaagatttgggaagaaaaattatttattttacatctttatccattatatctgtttaataagtttattttatagatttaaataagttaataagagttaaattacatttcaaatttagcataaaaaataatctctcttagacatattatcagagggatcattaattttatcaagcattttgagggaatgtattattgtcttcaacagaaaaataaaaatacaatactaaataaaataaagaagtggattgtaggattttcccctgataaaatgtcccaatctctttttcattttaatacttccccttaaccataatgaagtagagttgagctccattcctggaaaaacaataagacgaacaaagttcttgtttgatcaatgtttttatgccagcctgtccttacttagcagtgtctgataaggcatttccttgtgggcatttttcttttcttctcttttcccaataatcaaaattaaaaagtcaattattgaatgacttccatgtgcttggtactttgcaatggaaattttgccaaatacgccatgagtaatatttcaagaaactgtttgaacttgggtgggaagatgatatgtacatagcaagttacttctaagaaaatggaaagataaaaacagcattgtagagttaagaggagagttataacaattactactagtttttctttagaaaactaataatttactgttttatcttgagagtatattgctactgggctgatgtgggccatttcatgttatcttcagtgatacaaagtaaaaagtcttcgctttatctgtcaaggccaaaataaagtgtcaaggctaaaaggtaggtagatggcttccattttaacataattttaaaaaaatgtttaggagaatattcaaatctatgttataatctatgttttcagtatgaaaaatgacaacatattatacatcatatcatcatgtgataacatgttcaaaataaagtgattcttgtaacttttcacttaaaataatacattatgtactgggaagtaactgctatgagatattaaatacacccacaccccaggcagtagcacatgcaatatcttattcagctttatgactgttgctacctttaccttatgctttaactctgacagttgatcctccaatttgaactgtcttaacataaacaatttttttctttgaagcacaatcacttgaaatataaataaatcaatatattactgaggagttttaaagaacataggccaaggtttgatttctatgtgatctttaaatttaaaacattatctgctttctaagatgtcttttaattccctgtgcttcatgtttagttggtttcaaattgtcaataaaaatagggacatactttttaaagaaaaatacttgttaaaggaaagagttcttgaaatcatgtaattttttttttgttttgttttagagtgaattcttctttaattgacttgtaaagagtgaagtatttggaattcattttatttgatgtaggtagtagaaaatagcttgaagaagatatgccagatgtgcgatttagctgtcttcatcagtcttgagaaaatagagtgagcaaaggataaatccaacagttgttgaactacttttgcgtgtgggattctagttaacgagacaatgtctggatgcaattatttggaaagttcttgaccttttatttgtacaagttgatataattatgatttcatgaggaatggttttgaaattcttaaaccaattttagtcctgtgtttatattgtgtcttttactttagaaatcctggaaatgttttctacttttaacttttacagtgtgtctttaaaagctcacgttattagcttcaaagtgttttagtttaaattcccatttcaaagaattattcttgcttagttacaaagaaaatttgtaacagcattctatgattcttaattcaaatgccttcatatttttctatttgtacttgatgataaaaaatagagaaaataaatacatgtgtaccacttcttactggccagctaaccaaacttagcagtcaagtaacagctgcaaaaaccacttcaggttcctagctctatttctagagctgtcttgtccaggacagtggctgctacccacctgtggctcttgagcacctgaaaggtagatagtgcaaactgacatagtctttaagtgtaaagtacttgacaactttaaataagataataggaaaaaagaatgtaaaatttctcaataattttcatgtgggttacttattgaaacataataacttgaatacattaagtaaaatatattgttaaattactttcatctctttaatttcaattttttaaagatgcttacaattttatatggggttttcattatatttctattgaacagtgctattctacacacaagctcatcttccttaaatattgttggtgcctcgaaccatgattccatcacttcttttcattggccaatttctttttttcttttttttgaattgagacatagtttcactcttgtcacccaggctggaatgcaatggcgcgatctcggctcaccacaacctccacctcctaggtccaagagattctcctgcctcagcttcccacgtagctaggattacaggcattcaccactacggcagctaatttttgtatttttagcagagatggggtttcaccatgttggccaggctggtcttgaactcctgacctcaggtgatccgcctgcctcggccttccaaagtgctgggattacaggagtaagccaccgtgcctggctgccaatttctcataatagttgttgattcgcgtttcttcctgtgtccaatgtagactacaacttcttgtacattgtcttccataaaaatttattaactttctcaattccccattaaagtaacctgcaacttcttcattgccagatcgtctcagtccttattctcttttcctttctgtttttttttcttgagcatttgatagttttctgtcttttttttttttttttttttttttttttttgagacagagtctcgctctgttgcccagactggagtgcaatggcacaattttggctcattgcaacctctgcctccccggttcaagcaactctcctgcctcagcctcctgagtagctgggattacaggcaggtgccaccatgcctggccaatttgttattttcagtagagatggggtttcaccataatattggtcaggctggtcttgaactcctgacctcatgatcctcccacctcggcctcccaaggtgctgggattataggcttgagccacctcacgcagacagttttctgtcttttaaattttcattttgcttgtttccatcctgatctctttttccctgaattttatttctcaattaatattgtaaatgtatctttttcaccatggaattgtttatcgagtattggaaaaagtatgggacaaaattcccctctctcctcactcaccctgccccaagtacaccttgttttacctatatttctcaagactgagatttgctactctctattggtggaggggaactcctatttaagaatcacttccatggggagctactcttactgatgaaaatttatcaaaccctgcaagtatgcaagaatacttgaggttctctttcttaaaatatcaaataactcgtgctttgaatgattacttccgtgcagatgacttccaaatatatgtccgtttttctcctcggaactactagtatttgtcccattactgaagaacttcacatataaattccaccaccaccaaaatatattaaaaactgagcttatcttcactttcagcgttactcatcttgtttccagcaggatctcttttgtttcagctaaccaggctttcatatttttagtcatttttaatagagactttgctccctgaatccttgcattttataagctattaaacattgttgattataacttcattttctctcaacttcaccattcctattgcctctagtttataatattgctgatgtagtttgggacatgatagactttaggacaaatgaatcttctaaatgatttccttgcccacagactttccatttatgtttgaagccaaactatacatcaacaacagcaaaaagaaccctctcctccaaaaaccttcagtagttactgattgattataaaataagtcaatctaactttttaaaatttaaggcttagtatggtttccaaactatttccagattgattgcattcttctccattttaaagatgccttcatcaactaaactactgctgtttttcataaatattgtatgttctgtggctttagtgctttggctgttgtttgtccctatgtggggagggtactttttctgccaaatccctccttcccttaccccaagtctcgaattccaagttccatttgtgttccagagttccctcaaaggctacctgctccaaaactatcttcatggttttgcacaacgcctagttctctcttctgaactcccatagctttttcccttcaactttttttttcttttttttgagacggagtcttgttctgtcgcccaggttggagtgcaaaggcgtgatcttagctcactgcagcctctgcctctcgggttcaagcgattcttctgcctcagcctcccaagtagctggctaatttttgtatttttagtagagacggggtttcaccatgttggccaggctgggcttgaactcctgacctctagtcatccgcccacctcagcctgccaaagagctgggattataggcgtgagccaccacatctataatcttcaactttaaagtgtcatttatcagattgtatatggtgttatggttttccataaagatgttttatattctatttactctctaagaagacaggatctgtgtctgattcctttgtttactacagagctgagcacatggtatttaatacattatagattatgaaagttccataactatttatcaaatagatgcatgtactcatatacatcagatcgattaagaaaacacactattactgctctaatcctattgctgtgattgtctattgtttttatacttctgggttaactattgaataaaagggtaagcattcatattgatttgactccctctttcttacgggaaaaaaaatagcagtgcactttgaatatattagagtgctttcactttttcatttctgccatccaaccctttcaagtatatcgggccccattccatttgtctttcagcaatcacacacttttatatttatatatatattttaaaatctgtattcctttttaagatatttaccttttttccttaagctgttactatgctttatcaggtgtctttttggttttctcaataaaattgcccatatgttcaaggcctttgtcattatgctttagtactttagtgaaggtatgctgcagtatacgtaaaaagtccttaataaatttttgaatgaatctgatatgtgatggcacatcatggtaatctattctaaggtgaatcacaaacagcctagactatatgtgtcctcttaactttgagatttgttttcaataattattactctttggtcactttgaacaaaagctattttcatagactctggtccttcaaaactctttcctattgcttggggttgatgtctagaaaatccatgcatacctctaccactctgctggcattttccatactctctgtacacagctcagtatattttggtagctagtatcatggagatagatttttaatgcattttatatgaccttttaagaaaaagtgaggtgtgaaatagccagcaatcatttgcagctgccaaaaatgccatgcagggtgcctttgattttaccgactgccacaatctggctcaaatccttgtcattatctaagacaaatttctactctgttgtgttataaaaatagattaattataataaaacaggtaaaattttgaaatggattaccttatgggaagtaaaaataattggactctttcccttaatttctaaattacttctagaataagagaaatgtttggtgaagaatcttaacccatctaagcaatgcgtttgtcaagtaggaagggatatatataatcccatatatatacacgtatatcccatatacacatatgccatatacacgtatatcccatatacgtatatcccatatacacgtatatcccatatacacgtatatcccatatacacgtatatcccatatacgtgtatatcccatatacacgtatatcccgtatacgtgtatatcccatatacacgtatatcccgtatacgtgtatatcccatatacacgtatatccgtatacgtgtatatcccatatacgtgtatatcccgtatacgtgtatatcccatatacacgtatatcccgtatacgtgtatatcccatatacacgtatatcccgtatacgtgtatatcccatatacacgtatatcccgtatacgtgtatatcccatatacatacgtgtatcccatatacacgtatatcccatatacgtgtatcccatatacatatgtatatcccatatacgtgtatcccatatacatacgtatatcccatatacgagtatcccatatacatgtataaaccatatacgagtatcccatatatatgtataacccatatacgtgtatcccatatatgtataacccatatacgtatatcccatatatatgtatcacccatatacgtatatcccatatatatatcctgtgtgtgtatatataaatatcctgtgtctgtatatatatatatatcctgtgtgtgtatatatatatatatcctgtgtgtgtgtgtttatatatatgtatatatacatatatgggatatacatatatgtatatgggatatacgtatatgtatatggggtatacgtatatgggatatacatatatatggggtatacgtatatgggatatacatatatatggggtatacgtatatgggatatacatatatatggggtatacgtatatgggatatacatatatatggggtatacgtatatgggatatacatatatatggggtatacgtatatgggatatacatatatatggggtatacgtatatgggatatacatatatatggggtatacgtatatgggatatacatatatatggggtatacgtatatgggatatacatatatatggggtatacgtatatgggatatacatatatatggggtatacgtatatgggatatacatatatatggggtatacgtatatgggatatacatatatatggggtatacgtatatgggatatacatatatatggggtatacgtatatgggctatacatatatatggggtatacgtatatgggatacacatatatatggggtatacgtatatgggatatacatatatatggggtatacgtatatgggatatacatatatatggggtatacgtatatgggatatacatatatatggggtatacgtatatgggatatacatatatatggggtatacgtatatgggatatacatatatatggggtatacgtatatgggatatacatatatatgggtatacgtatatgggatatacatatatatggggtatacgtatatgggatatacatatatatggggtatatatgtatcccatatacatatatatatacacacacacatatatattcaagtgtgtttttattttgattttattttattttttgagatggagtgttgctctgccactcaggctggagtgcagtggtgcaatctcagctcagtgcaacctccgatccccaggttcaagtgcttctcctgcatcagcctcctgagtagctcggactacaggtacgggccaccatgcctggctaattgttgtatttttagtagagaagggtttcaccatgttggccactgactgtgctttggtttggcttataggaaataatttttatgaaccaaaattacatataacattcattttaagagaataatatgaattatttatgatgacaagtgaaccattatgtaaaatgctactgtcattaataaaatggcaccttatgatgtgaaattgcaaaatgactagcttacttttaggaagtcaccaacacactgggataatctgattgacaattacatcatatttttatatttaaggagtccttgctcctgtgtgctgtctaaaccactggtggatgaatacttttaacaattcttaatatatattagtgcagtgctgaagttatcaaagtgggtccgaagaataaatatatcaaatagcagtaataggccaggtgtgttggtcacacctgtaatcccggcagtttgggaggctgagataggcagattgcttgaacccaggacttcaagaccagcttgggcaatagagtgagaccttatctctacaaaacacaaacaaacaaacaagcaaacaaaaaacttggccaggcatagtggcgcacacctgtagtcccagctactcaagaggcagaggtgggaggatagcctgagcctgggagacagaggttgcagtgagtcgagattgtgccactgtactataatcttggtgtcagaatgagactccgtctcaaaaaacaataaccaaaaaacccccaaatagtagtaataatttaaaattagaataaaacgtgagcacttatgatgtattgtttttcaccatttatgaataccatttttttttaaggaccttgctatatggttagggtttggttgtttggaggtgaaattggggaaaggcattccagacagagaaaatgatatgagtaagtataggcagataggaaagatcatggggaaccaagagaaggaattgatggtagaagatgttagagtgagtttggaatcagaccataaagacattccagtgtcatgctaagaggtttggaaataacctataggggagtgattgacaaactgtttctagagacggttagatagtaaatatctgtaggctttgccagccttgtggtctctgttgcaactattcaactttgccattatagtgtgaaatcagccacaaaataaacaaaaggttgtggcagcattccaataaaactgtatttacaaataaaggtaggcaagatttggcctacagactattatttgctgacctctgctctagagaagagggacccaattggtgactttttttttttttttttttagaaatagtctcactcttgtcaccgaggctggagtgcagtggcgtggtctcagctcactgcaacctccacctcccgggttcaagtgattctcctgtctcagcctcccaagtagctgggattacaggtaccgaccaccacacccagctaatttttgtatttttagtacagatggggtttcaccatgttggccaggctggtctcgaactcctgagctcaggagattcatccgcctcggcctcccaaagtgctgggattacaggtgtgagccactgcgcctggcccagttggtgatttttaggcaaaaaggagaggtaattaaactaactgctgaactaggacagtagaagaggtaatgaaggaagagatagattggacagagcttttgaagtagacattatagatttcatgaaaaattcaaggaaaaaaataagtcgtctttcatattctggagcctagatggagctatagatgatggtggaatcaagatcccccaaatattggcaggctggaatgatagatcaaatatagttaacataagttttataaaggtcaatgtatgatcttcgttgaaaggattcaaaatggtgtacttagcagtttacattcagaaattatttgaagattttagttgactactctcaagctcaattatgagtttgaagagacagcgtaatgaagcaaaagagtattgaaatgatctcagaagaacccttggaactataaaactagttattccattggatccttaaaataactgctgaagaatgtaaggcatgaacttttctctatagagacagaatatttgggaattcagatctaagtttctttcacaattggatccagttggattgagcatccattctcaaaacttcacaatattttaacctcaagcaattctgacagcggagtctagtctacgatttgagtgttaatattacaaccatgggaattaggtaaaaagaatattccataacaccatttctaaagaacatcaagaaacaggccaggcgcggtggctcacgcctgtaatcccagcactttgggaggccgaggcgggtcgagcacgaggtcaggagatcgagaccatcctggctaacacggtgaaaccccatctctattaaaaatacaaaacgttagccgggtgtgatggcgggcgcctgtagtcccaggaggctgaggcaggagaatggcatgaacccgggaggtggagcttgcagtgagccgagatggtgccactgcactccagcctgggcgacagagcgagactctgtctccaaaaaaaaaaaaaaaaaagaagatcaagaaaccaaggaaaagagaagttaagtggcttgcttaaaatcaccttgcattctagtaatctagtaatagactcaacattagaatcttgtgctgttgtatttttaacccaggcttatctgtttaataacacgactggctcttgaagaatattacagagagagctttcctcatggagttcaactactttagacacttcagattattgcaaaagtgttcattctcaccatctttatgtaaggtagataaactacaattaagtaggtaatagttaattgctataactgtattccgtttgaaaaaaatataaattaaaatatataattttaggttcctgatatgctttgaatgccttaagagtctcaaaaggacacaactacattctgaaattaagaaaatgtagcccttagaattgcttaaaatcatcacatttcaaaaaaaaaatactgatttgtataattgtagctattttacatgacaattataactaataaaaataatgataagacaataacaaatcttaatggctgaatgtaaaataaaatttgctttctgctaagtaagctctcaggtgcacaacaaagtacataatgctttaggtgtttgtgtgtctgtaaatgccaaataatgaagagtgtgtgtttgtatatatctgtacacacatatacatatatgtgtgtatgtgtgtgcaaacactcatatgtacatgctcacacaatatataaaggaagaaattaaaattagacaacattatgcaataaaagtaaacattttgtgattgattttttgactttgcgtgcatgactcatgcttatttcaaatacattcagaatgagtagacttgtccttcatgtgattgaaaacatacattttacacaactttttattgcttctctgtacttagcttttaatctaggaaaaagaaatgtgtaaatagtttaaatacttgattcctcttggagaataagttggtacagaatagaataggctggtagccccaggtaatgacttctgcctttcttagaacttgttttcacctttgttgctttatttttctttatttttctctttttttaaaattattattatactttaagttttagggtacatgtgcacaatgtgcaggttagttacatatgtatacatgtgccatgctggtgtgctgcacccactaactcgtcatctagcatgtttctttatttttctagttataagattagaaaaactgatcaactttcattgtaccatgaaaaaatgtctttaatcttatgtttctttatagacatgatacatatatacagaataacttgttaagatgatttttgagtggagccgcaataaatgttcattccatattattgcatttaggatacattggtaaatcagaggattttaaaataaaggtggattggtagtgaatatttctgttacccaggtgcccatcaggcttggcttattctgctttatggccttgtaaacaattttgagaagttttattatttttagtgtacgttgagtaattctaattacctaatattcttcctctggagagactgaaaacttcgacaatacactaacaattgaattcacatatgcatattttattttaaactgattctaaacaagtttcattctgtgggtctgtcattgtgtttgtcattgttatgcatagattccacaggacctgactaacatttaacagtattaagggatgtaacatacatagcagtatgctagcaagagagtgattttgtgatagcttcattttatggatatcaatcctgattactagtgatagactaccataacccaagattcttttcaaggtcattgccatgttgatgctttccttaatatatttacttttcctaaagaggagtggtgtccttttatgtattcatttgtgtgtgactttttaaataagtatctcttaaaatctatcagaatgttctctcatatgtgtggactagatagattgcattcagaaatgccattttagatctgattattaatctaaaggggctatgaaaaataaaaagaaagcaaattcattttgggaataatttattcaaaataaatgtgcactctgggacatgaaacaagttcacttaatctgtacaaacatttaatgcaaaatcttcaatttaaatgaagtgccccaggtgaagctctcctctctattgtccatcactcttagatgtttttgtgttcttttacttgggatttcttcattaatctggggtaaattcttttgtaggatgaactaaataaaaaaaagtaaagttttccatatgctttccattcactgtctattacactgagtaaggaagctgattatcatatttaatttacatagttaaaaaaacctcaaaaaccaaacaaaacccaaacaggtggtttgtattgaagaaataaaataagcattattattatagaataggtcaattctttttctattacacattacttggatagaataaagtagacagctcatgctgagaaaactgaaatgtagagaatgcaagagttaaaagacagacaatacactcagtagtgtctcaggcatggatctctgaaaattatgaagaaccatcccacttgaatgaataaaaagcatgagcttatctgttgtttgctttcagttttgaaagtcattttataaattggggatgctaatgatttcatccttctgattaaatttatagagtcatttatttctcctatgttaaatgtatttgtgaggaattcatggaaattatttttattgctgaatacaatttttttctctttagaggcacagtttttgtaaagtgaaaatatttatgattatgctagtatagtccttagagtcatttactcatttctttagactcttcgggagcaaaatcaaccaaaaggtgtctttggtaatttaacacttaacctgagatgttaaggttttaatttgggaaattctaattttgggttctaaatgggtgtttccaaagagatatgatcatagttttggcaagtatcatacagtaaaataaaatccctcatgttaccaaatgaattttctaaatatttaaattgaataaaatgctttctttttatactgaagtatatgcacttcatagaaaactaatgattttgaaaggtagtttttcccgtttttctatttaattgacatttaattgacagcatgttttcaggagcagagatttttgagagtgctgatacattcatatattttaattgtagaaatcctggacatgaggagtgttttgcattaagtttcgcacctgatcacattcctgttggaaggtttccagagtgtggtctagaaaggactgttacttccaacttgtgccactgaaattaagatctactccccagagaagacaagtgaattaacacagtatgctttatgcacagtgaaaacaaactaatttgggttacttactactttgcttagaactgcaaaaagtgcagtagcatatacttgcagctgattgagtgaactccattttttatattaaatatagaatcagtgatttactacagggctttgtttcaggttcttctgaaatgctaacagtctctgaaactaggcttttgtgccaactacattccacagcaacattctcttccttttccatgtcctcattttcagctctttattggctgattgttgatagcaaataataaacattaaaaatcaacagacctataacctacatctttgtacatatcaaacacatttgaatagggaaatatcatcaatgccatattattagcaaataaagaataatcactcagacatgaagaagtattcaaagactggaagattttggtgatgaagacaggcgaaataatagaaatgtgcaccagggctgttggtgtatcttgtagggaagatctagaaaattagattaatcaaggagcagacatttggaagaaagtttgtgtgaatgcctgacagtcttgctctttccctcatttcaaatgttggcagggtagcaggcagctccaagggaaatgtgctcctttcatacttgagtaattgatgaattgtatgcaatatgcaaatgagaatccataaatcttatgaatgacagcttaatttatgtgagccttaatgaatgcaggattagattttaattaaatatcctcaaaggcaccctgagtagtagatttttttaggccttgttttttgaagacttgtttctcaagcaatgcattttacaaaagcggaaaatcaggcaaagaattcagcctatattttaataataagcattgtttcattttacatagaaaacagcagatcaattgattggtctttaacaaaatatgtatagatctatttattttctaaacatttctctaaattcgattacttttattgttggtctctgatatcatatgctatttttaattctgagaaagttattaaaactttactaaaaaatataccagagctaaagaattgtttaataagagatatattagatagataaacatttaaagtatcaaatataattagaataaaataaagtcttcctaaccattgttttctttttcaaaattgcctctctagacaatacttaatgagataagatgataaataagactattttatacatgatatttaataaggagacttgtatactaaaattaaactgaaatgatgtatactcctgtggaatagttacctctttaattcactttagtaccttgaatttaaatatagatttttcattgcctatttattggatgacaaaaaaatcactttatttttctattaggcgtatacttttttacttagaatttgtttaatttaggatgaaaatgcacatgtgatttggatgtttagatatccaaacaattatttcttacatttaaagcgttttcttgttaagtcacgctgagtttactgtttttaatactcatcagttgtttcaactaaatcagttttaaatctcagacatggaagtattcttttgctttttctctcagtaatgatactagtgcctatgtgcatataaataggaaaattcacattttcccctattaatgaaacaaacttatagggcttcaacatgcggtctattcgcctcaactccctgtagcattacaagtgtataattcattgagaagaatagaggtttaaaacatgccaggcagagtcttggtccatagctgagattctgagggggaagcatctgtgaggacctcaactgaaattgcatgcacaattttaggtaaatcactatgtgttcattaatgattaaaggggtccgtaactttcaacaggttctccaaggggatttgttatccagaaagacaaactataatgcaaaagacaatagcaaatacataactttgtggagcaaagtgtatctatttgaaaccaaaaaagccccatgtaatccagtgcctttataaaccatgcagctttctaagagatcaatcatgtgtaagcatgctttccttaaatcttccactcatattttttaatactgtattatttattttcagagcaatatccaaacaaaatatcctgcatttttgttttattttcaatgatgattgccatcccaaatattgtgaattaaggagcttatttctctaatagatattatcaattatatttttaatgtgtttatgtaaagaacatctactaatcaaagtaaaatttatacatgctacataaaatggcaatataattctagacaaaacaaattttaagatatttagcaaaaaatcaagatttagctagctttaaagtttatattttatatagtttcatcaactttactcttattggtaccactccttccctagggcattttactttaatattaaatgttagataccacaatgcactcagagaaagagaggactaacacttgaatgaaatgacagcttttgagaggagttttagaagtagaattcgatattttggttaatttctatttactttctctctcttttgtcttcttttttgaaactcagctgaatccgtaggttcattttcttagaggctacattgctcaaaacaattaaagctttgtcaagaaaggtgccttttgagaaacatggttttttgacgctaacattcatattgctttgatgagacttgttttgctaaaaatttttcaagtcttttttgttgtactaattttatgttcaaaaccattattttcaagttttcttttgaattttttttttacagtttcagtttcactaagatatgctataatccacatgtaaagtccgttttttgccaattgtaatatcacattttgatgttttgcacttgcaaatggagtgttagagagaattgcttgttcctttgcaaacccaaaagttatagttagttgtgattgacattcattataacataaaggttcatccatgaagaaacatttctaagacgagtgtttgagactgccaaatatttgaatgtttttattcctctaaagtagtctttatggagctaattggagcttaaaaaaatacaaatggacataaatcataaagaaacttacttgcaagttcctttacaattcttctctgtttaaaactctaggcataacatagtttctttcttttgatatcataactaacatacattttctatgtattttttgatataagtaatactttattcaattgacttggaaataacccatctactttgctgtgtataaaaaaattcagaaatggaagtatatggtatagttgtatcatatcaagagtgtttccaagttattttgaacaagttatagagcaggttttaggcaaatgttgatgatctcaggatttctgttggtcagttggagtaatttaagatttaaattggcatgcattgaatatattgtttttagttattataaatttaattttatttattcattcagtaaattatatttgctaaagggcagaaagttttgcctagttgggagtcaccaaatggaattatccaagtatagcaagctgtcttcagtacagttttgatgaaggttttcaaatgtaaaattacttctcacttgagctaaacaggataaatacaactataaaccccttagaagtttttgatgatagaagttttttcatatttgtttcctttattttgaaaacaaacaagttggaactagtttccattagatacgaatttatttttctacttaccttaggtttaagtgaatgcctacaaaatttcaatactgagagggcttttcagactaatctaagaattgctgattcctatcaaaatagtctgaaaggaaagtgaaaacaaaaatacaaaacaggccaggtgcagtggttcaggcctgtaagcccagcaatttgggaggccgaggtgggcagatcacttgaggccaggagtttgagaccaacctgagcaacatggtggaaccccgattctactaaaaagacaaaaattagcttggtatggtggcacttgcctgtaatccaagctactcaagaggctgaggtgggcggatcactagagcccagaaggcagaagttgcagtaagccaagacagcaccactgcacttcagactggaaaaggcagtgagactctgtctcaaaaaacaaaacaaaacaaaacaaaaaagcaaaacaataatttatcatttaatttgttaagaaacagaagaggattgatgtgggattagaacataaatttttaaaaaaccaccttactaaaaacagattttattgcgtcaaatgcaagtcaacatcaaaagaggtttttaatattactgttcaggtacctatttatttgtgcggtctgaagttataaaatatcttaaaacataatgccaaatatttggggaaccatgttaaccatgttaactaggacacattttattttattttttagataggatctcactctactgcctcggctggaatgcaatggtgtgatcagggttcactgcagcctcaaccttctggggtcaagtgatcctcctaccttaggctcctgagtagctggggctacaggcatgtgccaccacgctggactaattttttttttttttttttaatttgtgtagagacaaatttggcctggttttcccaggctggttctcaaactcctgggctcaagcgatccttttgcctcaacctcccaaagtgctaggattacaggtacaagctgctatgccagacctagacacattttaataggttttattttatttaggatagagaaatgtacaacggtttctggttttgacacaacaatccatgaaaaagatgaaaagaaacctggaactcagcacattctgctcttttgaatatagatggtactgagtcattcctttacaaagtctccaaataacagagatattctaaccctagcccctgctcctaagcattgagggaggaggtgataagaatcctcctcctctctttagctacacccccagctccatcgtagtttatgagaaagccacgaatagtatattgaagccccacagcaatgatgtagacattgaacccagaaagttgaagttcatacaagtaaaaactgaaacctgtaccttctgaccccaaatccaaagctctttcctcaacttttgaaactgaatgatactgtgtgtctggcttttcagtactttatcaacatatttagaactattgtttctagcaagataaaataataaatgagaaaatgatatatatctgtttggggattattttaaatgcatacagatttttacattgatataagccaagctcactatgatgatagttttcaagtattattatccggaagtacccccttcccaattttcaagttctgtccagaaagctattaagtaaccaaccactgctttctttggtgttcggtatgacttagtcatgagtagctgcaactgggagtttcacataggaaggacttgttatattccacctcgtagtcattagaagggaatgttgttctgtgaattattttttctaaaagaaggaaagaagcaagttgatattttctctcaaaaggtagaaaatctcataggaaatcaacaaatgtcaatatggagggagttagtaagaaaacaaaacttactaaacttcttaaaatcacccagaatgtctgtaaggaaagccaaaaggaagatggtttcctcactttcatcctgattgtattacctgtttataatacagaaactcatttatagcaaatggcatatgctggttgtatactgctaaggaatattactttctaatatataaattattcaaagtgatgattcatatactggagtaaaaataatttaatggtatagacttataattgcctaagagcataatttctaattctatccttataataaatatcattctaatagatacactattcaaaaggattattaaagcttcaggtatatattcataactttaagtgtctataatgtaccactcaagaagtaaaatgctttaacatattgttaagaactttcatctaaaatcttattttttaaatggatatcatatttctttttttccaacatacttttaaggaagaaaaaatgatatgaggatttcttaattattttatgatatcgcacaaaataaataaaaacctaagttaaaacataattcattgcacagcaaattactgaaacaaaagagaagaaaatgaggactagtccttttttattattcatatgacttggtgattattttagttcttttgaaatagtggctgcaaatgaaacgtagactgttaattgtgacattgctatcagaagcctctaaaaccaagctgcttttaatgaatgcaaagtcagataattacagaatttggactacccctagttaccaaatgagtaaaagtggcatttaagtgtttggccctttagttcagagctcttagtagatgaaaatatgttcatctcttacctcccctagtgataattataattgtattgttggatcacatctcttgactcttgtgtaatttagctctgtcagcattaatctcttggctgttcacatcagtggaactaaatgtctgcttaatattatgtaggttaggtggttgtcatcctagttgggagaaaacaatgaaaaaatttactgtggtgttaggcaaatgtattatgagggcatcaggctcaatatctgaacatcgacactatgtatagggaaatcatgtttggatatagatttttactttcttcaaataaaggattagtgttggctttgtttcttaaatatccataggtaatgtttccctattttttccaaccaatattattattgttgtttgttctacagtatttttaacaggaaatagctgtggatcatcaagtaagagagaaatgcattttataatgcagatttacattttcctttcagtatgtgatgacagggacatttatctgggtgtaggaacaatctgacaagtgtgagagataactgcttgatataaagtaactactgcaagaaaataaactttttgataaagacatcttagaactgataagtaaagtttagagaacataactgtctgctatcatgtatcatgtttttacctttatattgatctggatcttttatatggatagcaaagcattgacaaagaaggactaaagtagacatttatataatgcactttcagctgcagcattatctttacatgttagcaggcaaaggattcatatttcattaaaataccgatagtattctttatagaatctgaaaatttaaacaccatggagtgctttggaattttaaatgaatggttttcatttatattacattttaatttagttagtcaaacacatttgttagacatgattatgagctgagccttgaactagacgttatggctgacaatagggtaacaaggtgtgtctcttgacacacctatatatatttctgagagagaaaatatatttggggaatgcaaaaatgtgctgtgaacagcaaaagatttaaaacttagtaagagagcatacaaataaatactattcatatgtcagtgaagtccaaatgtctgccagcctcctggagtccattctttcttttctccccttcacatgctggaataagccatgctagctttcctttgctttcctgatcagacttaggccttttgcactcactagtccatttgctgagacattttctgctgattttcccatagcttcacccatccatagctgctaacttcttgatattcaagtctcatcttcttagagaagtcttctgtgtacaagtaatttaaagacagcattttagtagtttattcatctatttatgtgttgtctttcttcacctagattcttccccagtacgtaataaactctcaataaatattgaaccaaaaagataaataaagaactaaaagtagaaacagttaatatatttcaataaggcttcctggggaggtcactttttatttttatttatttatttgacagagtgtcactctgtggcccaggctggagtgcagtggcgtgatcacagctcagtgcagcctcaacctcctgtgctcaagtaatctttccacctcagcctccagagtagctgggactacaggttcatgccaccaagccaggctaatttttaaattttttgtagtgatggggtttcagtatgttaccgaggctgagattgaactccttggctcagacaatcctcccaaggccacttttaaaatctgtttttgatggaaagaaaagtgatactcttcttctttacccaaaagaaaaatataggtaatagaataatacacacagatagtgagcatagtatagaaagtgtactgtgacttctagaaaaaaatctatgtctattctttgcattgcatgaaattgtaatgtgaactgaaatgtagtcaaattggtgagaatgtggggtgttaagtttgtaaagaggctgaaagaccaaaagaagaggcttggtacatgctacagtaagacatgggatctatgttgttccttgagcagaaaatcctatgattaaataagccattctattttgggtcaaagacaacctttcaaaggtggcctacaaaggctcatttacttttgtacttaagaaatagcaccagaggttgcattcatacagaagaaggagcctcttttaaatgcaaatactcataatttaagcttttaactttaattatcaattaaatcctcgcagggtttagttgactgttgaaagcaaaatactaagatgtgtagatgtctggggtgatgggtttaaatgtcaatgggaggagtaagaatgccaacagaaaagaaagctccactaacagtagagacatgaagattgccagattataattttcctaaagcttgctttggctattacttaaaaatcttcttacctaataatttttattctaaaagcaatgggtaggatggtttataaatgggaatgttgatagagcagccagttatcaggataacataagatcctaaggaaatatgcacctaattaatgaaatagcaaacaaatggaaaagaaacaatatgtttgaatacataatcaactctacttggtgatggagattacagagaagggaatacagttttagaagagaaagaggcctcagcagtgggtgagctaaagcctgtaacaaatgccagtgtcaattttacaacatcctgatatactgagtaagttatctagctctacctgaacattgaagggagaaggatctgggagaaagagatttctattttttttttttttttttcagatatggtcttgctctgtcatccgggatggtgtgcagtgatgcgatcatagctcactgcattttggatttccctgacacaagtaatcctcctcctgagtagctgggagtataggtgcaccaccatgcccagctaattttgttttaatttttagtggaaatgaggtctcgctatgttgcccagactggtcttgaactcctgagctcgagagatccttctgcctgggcctcccaaagttctgggattgcacgtgtgagccagtgtgcccagccggaagagagcttttttttaagtctaactgttatgctctttcttccgtttggcaaaaataatctattactgagttcataagtgaaaggaatgaatttaatctgtcttttatttggttagcttttattcaatattttaaggttcccattttgttctcatcttttccatgtgagaccatatgctctctttccttcttcatttgttctggactttcgaatccttcaaccctgtggttgttcttttctggggccttctaggtgatccatgatctttttaaacactgggacacgtgattctacagagtctttgggtagcaaaagaccaaatgagagtgacatgctctcattggttctggttactctaattaacacttattaatattactgtacttgatttctgtgttttttttttaatttaaaagtttttttggactactaattccatattggttttgactgaaaaaacgaaagagatgttagatctaaagatctgactgatgagcttatgatgaatatggcaagtctcaaatgtggctggtatattcaatggcatacatcaagatacaggctatcattatattcctaagtagcaggaatctgaagaaaactagatttttttttccatcgactttatattttcctctccctgagagttacgaaatggacaatttaaattatgaatggaaacgcaatttaacgaaaaaacataaaaatgtgtaaataagaaacaaatctaagcgggcatagaggcatagaattaatgtgtgtgtgtgtgtgtgtgtgtgtgtgtgtgtgtgtgtgattacacacacaggtccttgcagtgttttcatttctggtcaccaccttagcaaactaatcaatgaggcatgaactgctatctgcagtgaaagaaatgtaaaataaaccagagataatccctcagttaaaaggttattctgtgtgataaaagctattttgttaatttatttacttactggtacagtgagataaagtgaaagtacaattaggcatttcttgttgaaagaattttaaagggcaatgatgacttaatattctgtattatttgactgacatttaaaataatttttaaactaaaattttttgtagcacacaaaattgtgtattattttgctttagtttattttatattttgaattttgtaggtgtgtacataatataattgattattcagtaaaaatgaatataaaatcttctttggatgaatccttagcattaggtctcttaatttaatgagggatggaaattttttggaaaggctattcctgtaaagtaatattttctgttaattacatgcatgatgtatactttaaaaaaatagttaattacctaatgcatgcaaggcttaaaacctggatgacaggttgatggttgcagcaaaccaccatggcacatgtatacctatgtaacaaacctgcacatatatcccagaacttaaagtaaaataaaaataaattaaattcaaaaaataattcatttgtttcttcttcagctgattcatccagcaaacagtaatacttttatccttattaccagaccattgaattctggcaaaagaggaatatatagaacatagttgctgcatttaaaggttttgttggcagactaaaataatacataaattattatgttaatagaaagactaatatgatactatggtattccatgatacaatagaagtaaaaggcaattggtgagcacttgggaagattagggaagaagttggtgagaattggtgtagggcttctcacatgtacaactgaaggaatgggcatttcaggaagaaggattagatctgtaaagcatgaatatgtgaaagtaattaggttccaactacagagtgagggtaggaaagttatgagaaattatacctgaaaggaattgaggtgctagattttgaagagtcttgtatgctatgataagaaatttggtgaatatttagattcgcagaaggcactgaatgtgctataatgttatttctatatagaacacttaggtcagtatcaaacactacaggaacacaggaggacctgagagaaggcaggagcaatgtgaatgaagaagagagtgagttggaagatgtatcataggcagaatcaatagaagatgatgattattaagctaagaagtagaaagtacattgaaaaagagggaaggattgggaagactctctgggctctggttttggggattggatggatggtggtttattttctgagatatgtaatgcaataggtaatgaggtgcaggtttaaggtagaagataagaagtttacatcagacatgttgaatttgaggcacttgtgaaatgttcagatatcacttacacctctagaaagatagatttcaaactcaagagaaaaaggaaaacattatttctgtattcccagatgtttgttttaataattgataagctaaacttcaatttaatttctaagctgatatgaaattatttgaggggtatagatttttcagtctccagagtttttgttatttttttttaggagaaacaactgaagaaaattatttttcagagcccattaattgttccccgagactgaaagttgtctttttatttacataaaagacatatctcgttctcattggaaatactctgcattaatatactctatgttcaccaatagacagctattgaaattagctatttcaatagatatcaacagctgttaaaatttctgtataatacttttactcagagaaatcaggcagggcaggaggaagaatagtgacattgagttagaaatgagattaagataatggcacaaatataggaaaccgccttcttaggttggaagaatgtaccctgaacagagcagcatacacacagccatctttttcctttgtgctcactgttcacattcttattaaatgctctatgctaatattagcttctttgactattttatttcaggtttttaagttttattggctatagcacttcttgagggtgttagggaagggaagatgtggataccaaaaggttaagtgacttgtcaaggtcacacatctaataagtgacagcttctgtcttttgatccatggcaaagtgaccttttgtctctactattcagaggcaccatggtataatggaataagtacaggctttgaagtcggagatacatggatctgacataaagatctaaaatttatgagtcatgctgttgggccagtcagctcaaatttcctcatctgagagatggagataataatatctgcctaaaacggttgttggaatttaaatgagatagatattttacttacctgttagtagatgttctgtgtatgttagctatcccttttttctcagttaagtcacaaccttaactccttgttctcaaacttggaaaaaagagaatcagtgaagccactatcaagagttgaaagggtagaccaatactttctctgcctattttatttcttggcttcatgatcttctttccatcctttctattttaaaatacatttttaaaaaatctctcttattggtgccctaaatattctaaacattgataggtttctttaaagtcaaattagtgtttaacctgcactttcagtaatattttttatattactacttggaaagtcagctcaagaacgggataaaaatattaatcctatattttcataaggaatctttactaaatataataaaattccacagatgtcttttattttttgtttcgtcctcccatttctcaaatgtgtataatactggatgtaagcatacaccaatgtaaacctacacctacaaaaatgaatttcaactaataactaacttactcaagttaaagtatgaacaagttgttgctataaacatgatacttttcgaaaaggattcttactattttgtaattctggaaaaatattattttaaggacaactattgatacaatggcccatgtcctgttttgttttgttttgttttgttttgtttaattgtccccgtttcttcgttctgttaatatttttaactcctttttatatgggggcaaaattctattttcttcttattggtacgttgaggcctagtgttgccataacaaaaatcttatccacatgatccaactctcctattggaaccactgaaactgtttctatgaaagtgtaccataaaatagcccatatgaaataatattcaggaagatatgatatagctgagcatctatttatgcacagttgacattttgaagtaattcataatagttaatatgtaataaatatatgatattcaagtatctgtagagacattttgagagagcttcaagtaatgatagaataacttttccttaccattattttatctttattaattttttcttaatattgtagttgaaaataagaagtggtaaaaaggctgaatctgaactacctctataatacttatttatgattattagaaattatatttgtctaatttttctgaatttgatcattctcttttaaaattttgcttgtagtattacaaattcttgaaaactggatttaaaacaaaaatctaatacaccttttattgaacgagatgggaatgatgctactacaatttatctaatacattgcttatcatgctgcaattgcagaataacaaatattttaatttgtatctttaatcaattatgtcttcatacctttattgcctgtagaagaacatagacaaaatttcatacagtgttaccttttaagacagatcaccatgagaatttaataaaatgactaagttaaatgtaagattatctaaatctataatgatttaaatcatctgttttttactaatgcatccagaagctttttttgtgtgtgtgggattaggccttatctgcaaataaactttggtagtgatataattataagagaacaataatatatttctgtagtctaccatttagtccatgttttatgcacgtttagaccattgaattaatctctgaaacaatagaaataaattctttactagaaatagcttgcttttgccttggctttgtggcaaagcgacattagggaacatatatggttgttgttgaacctgattgctttagcagcccttgggttgatagtatcaggttccagcctgccctgctaggtcaacgtggacccagggctttaaagagaaaagttcagggaaagttcacttctattgttttaccatggttacaaaacagaaaggaaaaaaaaaaaaagaagaagaaaagaagaaatcttgggcttgtgaccccttgctgccatgggcccattactggcttctttttgtttttgtcaattaaacattgcatcagagaaaattaaaacttacaataatctataaaggaatagaagccaaagtttattctattatcacttgtaggcaatcctcaaacatattcagtgactgctagagtcattgctataagtgtttaatttcattttaaatgttatttaaattttccattagtgaaatatgaaaaggttgtttattgattttttggggggtaaaggaaatagtttattaaaaataatttaacgctgactaaataggttgaaataagtatttattttaaattaaggggggaaatgtaaactaaagcaacattttcattaaaaaaatttttgtttaccttaaatggcaagaagttgtgatatgtaataggccagcatgtcgtacatggaacaacctctaagtttcttttgaatacagctaaaaattcaaaccaatttaaaatcctgaactttagactacaacctaaacttgcagaaatttttgttctaaaaacatttgccaagtgtttgttctgaggaaggtcaatgcaatgtagtttatttcacattttgtcctctgagcctataaaatattacagctaaagcagtatagctgaagctattcttattttaaaaatattaatgatacccataatatgtatgttatctatataccccagacataatcattgcctgatatttcaatttaatttttgtccacattttatttttaatatgaattgatattcaaaaaaaaggttttcagattgaagttctaagaaaaaaagatttaatttctgaaaaaaatatgatttaagaatatatattcaaatgaattaaaagaaatctacattagatatttcttcagtaaagacattatgggtcattttagaatttctattattatactaaaaatcctgtatcattttttatttgtcatgcattccaatgccagagatgagaagtgaaggggggattacatagaaccaagataacagatgaatctttgtaactctttggaacgacattagctatggttatatgctcatttgtttattgatcctttgctgttttggttaacataatttattttccttgaagtcacctgtgtcaagcatagaactgaactttctcatgatctagatagagtgtaataaaagaaaagggaagtatttaagtatctatttaaatgagtcagacaatgtagcaagtatcaaaaacattcctcatgtgacttttatcatatcatttatagtaatcaaaaataacattcgtgctagtcttatcataaatacctgctattttcattatcacactgaaatgacaaaattttaaatggtccccatattgcttattcttttaacatgtgaaggatagattttttaaaaaaaattaattctggtttgattacaaatgattattttaatctgtcatccacaccttttcaatgtggtttactcatgttaaaatgggaaatatttaatgtgtagaatgtttaacattgctgatgatcacttctgaataaaaaggactgcttgagtaaccgaatcaggtagcagataaaaagtagtttatgacttatgaattcagaggtcatctagtccttcacctgcctgcagacaggacttacctcaactattcaagataaatggctgtcttagatgttaaaaaccttcaagagaagagtctgtggagaccttccctgataacctattctaatgtttaactgctctaatgagaggaagaactattttttcatatctcatctatatccctcctgttgcagtttaagtgttgatacttatttttaatgttattttcatgctctttattgctgtgtattctgaatttattattggccagattttcccagtgcatgaagtgttagaaataaatttcatgcatttttcaaggatccagcctagtgtatgacctaaacgtgtattgcttaacttcaatggctttgcaatcctgttttctttctacttagaaccatttcttccatcaataaagagacataattatttacttttatatagaataactgactagggtattgtttgatccattcatgccccagtgaactaaacagctgtaatatgaattggttaagtaatatttaatttttctaaaatttaccccagaagtcaacttctaagtgtcttccaaaagggaattcctcaaagactatcaaaccctaatacaatttttaagtaaatttctttgctttgcagatgttccactgaattcatttcttctgctattttatgtaagaattttttagtaaagagggaagaaaggaaatgttggaagatttttaggcaggctgtcatgtgttttcctacctggccacctccaaaatgatacttactcaaaccttattttgtcttttaatctttcagtgtctttcaaatagaagcagttcaaaaatctaaattccttagtgtggcttacaagatcctttatgatagctcttgttcacttttccatcctgtttttcttgtaacactctcctcctgttcatcacacacacacacataaacacacacacacacacacacacacacacacacacacaaaaccctcatatttgaacctcactttcaggccccataaaattctagttctcattaatctctggggctttctatgatcctctgcgcatccctctcaatggtccaatttgcgtggcaccttttctttaaaatttggcaaagatgaaaagtccttgagatggaatctgaagggaaatgtaattttctttataaaaatcaatttattaatgtatttacacagcattatttcaaagtcaagccttatgatattttgaagtcaggaattgtctttttctttcttttcaatccctcttcagacaaataaagttctagtctctgttcccaataagtagactatttataatcacatttggatgcaagatattcataaaattacaaaaaatatatgtgtaagcctagacaacatggtgaaaccccatctttacaaaaaaatacaaaaattagccaggcatggtggtgcaaacttgtagtctcagctattagggaggttaaggtggaaggatcgattgagcccagaaattcgaggctgtagtgagccgtgatcacgccactccaccactgcactttgctctttgaggcagagcaaaaccctgtcaaatatatatgtgtgtgggtgtatttatttatttatacagtaatgttcccttatctgcagggtgtacatttccagaccttcagtggattcctgaaatggcggacagtacccaactctctatatactatgcttttttctatatgtgcatacttataataaaatttaacttacaagttaggcaaaggaagagattagcaatgactgataatgaaatagagcaattataccaatatgccagcatcactactctggccttttcacacccttattaaataaaataaggattacttgaacacaaccactgcgatactgccacagttcatctggtaaccacaagagttagttactaagtgactaaagagtgggtatacatggcctgtatactctggaaaatggacaattcacgtctcggtgggacaaagcaggacagcacaagattttatcacagtattcagaatggcacacgatttaaaactgtgacatgcttatttctggaagtttctatttaatgtttttggactgtggttggcaggggtaattgaaactgccaagagcaaaaccatggataataggggactactgtatatataacgcattttattaatcaagggaaaattttatatatttcagtgatgaattgatattttaaaaaagtacatatataagttaagtttggctatgaagaagttaaatcatttaaaaaatacggccaggcacggtggctcacgcctgtaatcccagcactttgggaggccgaggcaggaggatcatgaggtcaggagatcgagaccatcctggctaacatggtgaaaccccgtctctactaaaaatacaaaaaaattagtcgggcatggtggcgggcgcctgtagtcccagctactcgggaggctgaggcaggagaatggcgtgaacccgggaggctgagcttgcagtgagccgagatcgcgccactgcactccagcttgggcgacagagcgagactccgtctcaaaaaaaaaaaaaaaaaaacaacaaaaaacttggaaaccctgagaaagcttattgacaaagtaataatcataagcaacattttaagaacatttagagaagaattggatgtagaaaagttggtaacaaacaatacttggaagatattagcttgcttatctgaatgttttgcaaaccatattacaagaatcactgtaggctatttaaatcttcaacgaagattattttgcagttattacacttagatatattcttcataatatattatatgttaatatattcttcagtttcataaatggtattgatgagattggatacaagaaagggtagcagtttgatatgggaaacaccagaaaacttctattcaaatgttttattaaatagttttcaactaagtattttagcccaaaataaaacatgcaatctctttctccagatctgtatttgaaaaaatgaaattatactgatttcagataatcctctctttaaaataataatttactaagttaatatggtcatattcctattttgaaggaattaagttgagaagtgaaaaacttaataaatgaactgctttgattcaatcaagtcaagcttacttttaataccagactttaatttgactatatggtttgcttgttgattgctttgttgttatagatcgaggcacaggaataagccatgcagaagagactatatatttcaaatgcacccttaatcagggtttttattttgtttttactttttttttttttcatttttggttttagtgaaaatcgccagtttgtttgttttttgctataaaacttaagtgctttattttaatttataggtgattactagcctttggagaaaaagaagttagattactcaccaagtatattattatgcttttccacttcagtgggcctggtgaaactttcttatgagctctctttcaaggataaaagccaaatagtgggaggtgtttttgaaacaccatgtgcccttgagtatggctcacttacccatctcttcatcctccctttcattgttctcctacagcctgttatttttaaatctagatttctgccattatcttctattaaagatgccaccctctagtctttttctccaactttacgtttacaccaatttacatttcattccatttccttgcttaaagttattacttttcttataaataaaatctaggtaggcttttaaggcccttggaaatctgattacaaattatcctctcttaatttcatcttctctagatgtaagagcctaattattacgtctaaacaaatattatgtcatgcctttgttctgcttctgttctctgggattatttgcctctccttactttcttttcccttgccaaattccagttcactttcatgaccaagtgttcagggaggctcagggctactccttccccaaagcccaccatctgcatttgggcaccgtgtacacaggctcactttcaggacaagcccagtgcaaaatacaaatgtagggtcccttattttaaaatggtaagaattcaagatgctgacagcagagcattaaatccagcagaagaaactcttccaagcacgtgacttgtgcagctgcacaggttgcatgccctgctgagacttcctcaagaaatgctcccatagcatgtagttcacatctttattatgttgcatttacacagcatgcttactgcatgtgtatgtatgtgcctgtcaccccaagagcttgcaagttccatgaggggacagacctgtcttaatgttctttcaagtcctttgacctagtcaatttcctcacaggaagagatactcactaaatgtattaaattaaatgtgaagatgactatgggaaataaaaacattcaaatgtgtgtttatctaagactttaatatcaaataatttgtgaaataaagtttttagatatattaaaatgaaaatcatagtttatcaatacggtctttaaaacagtttaaatagcgacagtaaactcttactgtaccgaggcagattcattataaatgtgagaattcagttggaaatagagttgaaagaataattctaggacatacagtattaacttgactttaatatgagaattaatgcattttaacatttttcaactttatataatacttcaaataagaatgcatattttggtctgaaaaaaatagatatagaataaaattgtgtagtgaaaaaaattaccacaagccaagagaattattctgaaagaatttaggtgagtgaaattatcaagaaaacatgatagttcatattcgtgaagaaatcaattttatttttgtatcaagccagtgcttgaaaagaatggaatatgtccaagtaatcacatcacatgtttttgctaaatttcagataattaaaaataaatagcaaacaaactgggaaattatgtcttactgttttgattatttcaaatctgaatatttgcaaatatgctatctttgttgggatttcaattaagcaggctgttattaaaaatacatctcactgtaaaaaatataaatatgctacccaatagatttcaattaatactaagttcttaaatggatgaaaggctaataatatgttttaattaatataaagattaataatataattaataatatgtttttatcccttttgttgtcctgattctttatagaaaatcaaggaagttgtacataataaaatgccacttaaaaactctaagatgatatagggttctattgtgagttctgtaacattcgcattagaaaatatcctattctgactgaatttttacatgacttgaagctggtggtaaaggtagagaatatttatgatgacaaggttttgatcactagatttcttgattgataagaaaaaatatctgatagtttctaaaaagaaaaataaatatatgctattgtacaagggtacagaagaaaaaggatataaattgaaggttagttgttgaacaagtgtgctatggagaaaagggaaaaggagatatgaatagagaagcacacttacagaatttgtatgaaccatatgataattactaattgttttaatggagacttcatgacatgctcagaagagataagacttgatttacttgattctaaaaaaaaaaagaaagacttttcatatagagatctaagtggtaattccaaagtcttttggctctttaacatcagaaaataacttttcccaagtttttgctatggaaggattggaggagtttctttggtagctaacaaattgcctatctgcctatacattcattgataggcttgagctatgtgaattcaatgaagaattcaaatccataaaacattttttgaataaattcatttttaatgatgtttaatgattttttaatgatgagttctaaatgatgttaaaccactgtcttccatacacttcagcagtccttatctacttataagcaagtgctcatttgcagacaggtttgttagtttcttcaagtgaagcccaatgtgctgagagagttgtagccaacaacatttcggtccctaaatagcgctttagagcattttctagtttctggttgtggactttattctttttcccaacccagagtcattgaataaataaagataaaaatcttaacacaaaatattattactagaggaaaacgaagtccaagatttatgacagtctaccttgacaatattcactctgtacttagctgtttgataatttttggtcctgtcctacaccttatatcttgaacagcattatctccaaacacaatggatcactctttatatatgtgctaggaaatatagcttagtgctagtttcaacatcactaccataaaaatgtgaatgtaaatgaatagtcttttaatcaaaatgtatcagagaaattaccgaatttattttatttttgtattttatttttttaattattttatttcttccaaaatgattttagaggaactaccttcaaaccagtacaaatatttcataaatagtatctggccgatttctagccaattgagcaatttgttgcacaataagccacctcatgtctttcagtaaaaaataacattaagttcaaataataaagacgttacacaataaattaggacacaattaaaatttgctttaaatatttcttggggggaggggacgccatacttctactcaataaagagaaacattttcacagtccagagatcttttatttttattttttaaataccttttaagccatgaatccacagggaagaggttccagcagctcaggctccctgccatgggttctcataaagtgtgcttctctgggtggagcaggctggtgcttcagttgcacccaggtatgtttctctttggcttccttctgttactgatcactttccttcacacatttcaggaagctatctcagctcttagagttcttcatatactcagtacgcacattaattctctttgcaagaagcttgcccttaacttgtttaaaacaatgtcaacagcatgctggggaacatggtagactcttccagttttgccatggtaacacctgtggagcattcctttttgaacagtacgcattctcttgatgtctacaatatcaccttacagatttgcatattcgtggccaaaggatcaactctatgttgtctcaaaggcctagagaacatatatcaggtgcctctcttctttccctttgtttttctcattttgatgaattactggaagatggcgggtccagaaaaaaggactgcattgatttttgaagcaaagaagcatacttaaatatattgtattttttaattaaaatcggtttgtctctacacttccttatttgaagagatgaaatgtcatcattaagtagtttgaaagtgaatttttatcactctattttgaactcagtaaaattttttcacattgtaataacttcattttaggcctgtattcatcttcccctccatacttggacagacggtcttggattatttgttaataatcaggtacaatatttagtaagtcagtgtttatcaatatatctgtcttaacatgtagacttcacatagctggtaccatcatttaaaatccaactttctctcctcttttcctcccctaagggtgaatgcagaattaacttgaaggagcagatttgctgtgattaggggtctactcttagtcctatgcagtttccttaccctactcataggtgttgaaagctttgagtttcttttcacataaaggttgtttacttctgatgcattctatctgcagttgagctctagcatacatatgctcttcattttaagtatcacaaaaaataattatgttatttatgacgcatcttgtgcagtcagctttacctgcagcaacaaacaataccaacatctcactggcttatgacaacaaccatttctttatatttgaggactgctgatcagggaccactctgctgagctctgctatggtctgctgacccatgcgctctcatagaagacaacagaggctcaggaagggacagatctatgttggtccatgtcagacttcttcccagtgacggtatatgtcacatctgctcacatgtcattggccacagcaagtctcatagccaagctcaaattaaaaaaggaggaaaaccttctataatgaagaaagtgttattctcattctgcctatgtgaaagcagggcaaggtcaggaagggaatagctaattgtgaacaatacatggcacttattagtcaacatgaatttattaaatgcccattatcttttgactctgctaagatactatatgacacacaattaagaaaattagtccttgtttagaagtaaatttttaaaaagagaacagtttaaaaatgattaaatcctaaccaactactgctttacaatctaggttgagatggcaataaatatgttagactataagttgttaaacagatatttgaaaatccagtcatatatattcctaattagctcctgaataagagtggcaagtctctttaatatgatcctcatataacctcttggaatgttatggtctaataattttttctcttgtgcaaaattcttgtgaattgattaaattgactttagaagagatctatttttttctcactaattttaaagaagtaatttatggtttaatcctttaaaataaaattaactctcgatttggcagcatcatttatgctgttgtcagtaccaccttttcctaagataattattatcatgtgtttcaggaaagatgttagggtatatttcaatgcttttctttttttaatcagcattgttccctgtctcaataaatctctattattatacaagttcaatgctaccttttgcgtgacaatattttctgcttcaatgtagaggaaaaataaatttaaagtaattactttcagaagtttattgttttataggactgttgtaagtatataggatgcaaagcatttgttaatgtttgcttgttaagctcactgaaggtagatgtttatacaagcccagaattattttctttcttccctgttccaaagtacttcaagctaatcaaggaaataattcactggtggcaaactttggaaattgtttcataagaaatctagatttaaatatgctgtatgattttcattttaatttagtaagttaaaggggaagtttatataaaaatgatatgcaatttaggatcattttaaagttgagaacttcatatatttcaagtctttagatgtgaataatttgagcttggtgtatacatttcttgtgacttgcgtaacttttaaaactaaaagttagaataaaatggaaaaacatggattttgcatcattttatatatgtgttaaatactttatttatttatttttttggataagaagaagaggaaaaagagaagacagataacagaaactgaagctttcccatgcacacgcaggcatgtggagttggtatcatgacacttaattttcaaatggaaaactttgttttagtgtcgcaagaaagcactggactagaagtttaggctcccctgttgaaaagcaactatataatcaaacactgtaaaacagtacggaattgaacaaaccttcacacctcatcatgaaatctgaatttttttattactctgaattaatttacttttctgtttacttacccatattttatcatctcacacaggatactttctgatttttattttcatctttctacctccagaaactctatctgtagtttagttttagtccatcattttagtgtgcattttagatttcatctccaaaccctagttacttccttaactacctcctatcaatcccccttttgttctgtcactatctcccatttccttttttatttgatttttctggattgcatctttgatgtttagatgattttcacttatatatctgaacaaggaatcatcaaatagaaaatattttgtaagaagatacagagatatatgcatcattcattataggaaaaaacacggttactaaagtactacaatttttggaaaacaattgcatctaaagttatatgtattaattataactctgattgtcacatattatattgcattatgaaatctcagatttaaatatacacttacctaagaaaatgtctcgattatgtagtaatttaataaccatttatgtttattgacttcaaatagcttagtacatatatatgaacatttattaaaaaaagatttaaatgaatctgtgtttttgttaagtaaatgctatccttgcttgcatatcagttaataaccttttgcatctgccttatttctgatgtatgcatgcaaattataaacatctacttatgctttaagatcagggaggattgataaaattttattagcaagtcagattttaaattttaaaaaagtcaagtgctggttttgtgttttttattctataattggggaaaggttcctagaaaatacttcactaaagttaaaatttagaaatccatggattttgcatttaacttattaaaggctaatttactttgaacttctcttaactaattaaaagctcagatagaatcagggatgtggaaagtttggaaacatcaacttgcattaattttgttttcaaatataaagattttattgtataccctaactccatgggaggtaagaacatcttctttcttgccatattacagtattactatatctgtgcattcagggctgtccaggtagtcacagtgacttaacttaacctatggcaagtccttaaatgtaactatgttcattaggactgcttatttctaactaagcttgctctctctctctctctcttttttttttttttttttttgagatggagtcttgcagtcttgctgtgtgtcacccaggatggagtgcagtggtgcgatctctgcttactgcaacttctgcctcccgggttcatgtgattctcctgcctcagcctcttgagtagctgagaatacagccgtgcgtcaccacccccggctaatttttgtgtttttagtggagacggggtttcaccgtgttagtcaggctggtctcgaactcctgacctcgtgatccgcccaactcggactcccaaagtgctgggattataggcgtgagccaccatgcctggccagcttgctctcttaacagcaggggtggcttcctgtttttactaagatcaatttttttctttgccttttcttatttcctgttctcaatgcatttgctagctccattgacttcagcatatatggaggatgccaacgtgtgtccaaacactgtgtgtctcgtgtgtgtgtgtgtgtgtgcacatgcatgcacgcacacacacttttcacagactttcagaatgaattatcctaagtggtcaagcaaatagtgactagaaaacaacaaaaaataattggtaaaattaaaacgtgtaattaactgttttaagcaattcagactcagaaatgtagttaaataagaacaggagcattgcttttaacatttttttaatgaaagtaaaaatatccattttgacataaagtgagactatagcaatttcatatagttggctataaaatatagttggaaaagctgatacaagttttgatatttctttgttagttatgcgttcctataaataagaccaatatgcacactcaaggcatcccttcaaatatttcttcaaagcttatgaaaagttttgtgtgaagactgaaaacaagagaaattatttggattgatgcaataacatcttgtccagcaagattctccattcttttttcatcgtgttcacattgacagtttatataccaggaaggttttgttcataaactactcaccacacaccacccattcaaggtagagtaaatcctatcggtgaacccaataaaagagtatagtgcttttactccaaagaggccatgccttctgggaagatatactactctttgtcattcaaccagggaagccttgagattgaataaaattcattgttgaagcctaaagaaggaaaagctagtttttgaaaaagtcaggctaaatgttaccaaaaaatgaaatacaattttaaaattgactgcttggaagtgtaagtaaagaggagagattttaaaatgtagttagcaatcctcgtgtctatattcatttttatcttttttcctttaagaagtttttgacatagtattttctggtaaaaatacttccttgcaattgtagctccccttggtatacaggacttttgaaagctgaatttgccctaaagtattttagtttgtgaaagacaaatagccaagttatatataattgtgaataaaatctaccgttacaatccttatgttcagtcagtttagaatggatttctaattatttattttttctttttacatgcacttctaaaataaaggtcttctgtacatacacagtttacttctatccaacattttcagagtattaaatgttttagttttccctggtgtgtgaaaaataattgttttttaatggcactaaatctacccctggatcccctagtaccttccgtgtttctctgatttaaaaataaataaatagaacacaaaatcttgttcactgccagatatttaaagaattttaaaaactagtaagaaagtaaagatttaataacatattgcatccacaagaggaaaatactgatagcctatacaaaatatgatcatactgttgtctaacctgttgtaacacataaaaatctacaatggacaggtttttgtatttttaaaatctagatttctataatatatattttaatgacttactataatttcagtctagtatacaccgtaatttattcaacctaacacaattatatgagcctttagggttttatttttgcatattctctctctctctctcattatttcttcagaatgaatttttagatttatcaatataaaagtgttggtttaagtagcattcatattttaaatttcaatacagaggactaaacgttctttgagaaatattatattctaccagtgtcgtatcagtatgttttagctttgccagagtgatggccaaagtatgatattttatatttgatttgatttttaattccttatgtgctagtgaaattgtaaatcttttaatgtttattaactaattacatatgtgtattatttttctattcatatgcatttgccatttattattggatttttcatttgttttattatttacttatttatttatctatttttaagacggagtctcgctctgtcacccaggctggagtgcagtggcgcggctcactgtaacttgcacctcccgggttttagcaatttcctgcaataattatccgtcttttacatacacatttttcttctttgtcgctttatttcagaattaattgtcttaaaaatgtttttaatttgtatgtgtataattctatcaatcatttactcagtactttctggcattaatgtcattcttataaagtattattccaaatatagactttttactcatttgtaatctgtaatctccttttaaaatgcataaaatcgggctctatttcaacttttcaaatagccagcaaattttaacaccatttttaaaattaatatagccttccaatggtattaaatgcattattttaggactttcatatattaccatgaatatataagaaagaatctctgagtacaaaatgtgctattatagtttaaaggtggtttatttttgataatctagaaccctggactaaataatataattaaaaattgacacttcattgtaaaagtataaattaaaatttaagtacatgtgtctagatttgtaagccatgtttaaaaatttacatatttgggcatagactactttggttgataatttcaagctctatagattgctataagttgaaaaatttatggatgattctgtttccaaccacatcattttgaagagctaagataaatccagaatattcagtgggagacagggtaatgcaaagaaggcactaactcaaaagccttccactttatcatcattatcaagttggcgccatacacaacactctgacaagtcggagtaccatcctttcaggtctttaaataactgctaagacaatgttgattcagatggccatagatcagcaatgtgtatccattccttccttcacccagtcattcattttttttcatttaataaatatttatcgagtccctactttgtgccaaacattgctcctctaaaatggggatattccagtgaacaaaacattcaaaatctctgccctcatgaaatatgcaagacagatagtcaccaataaacaagtagctatgtggtatttctgaacaacactgaagataaaaacacagtgaggtgggagaagggaactattaagtggacccagtgcactttgcgtagtggttggggaaggtgagacatggggatgtttgactgaagagcattctaagcagcagcaacagcaagtggagacaggaacattcaattctttttagagataatacgtatatttttaaatagtaaatatattcagagtcgtggaatagcagtgcagtcttaaaagtgaatttcaggccgggcacggtggctcatgcctgtaatcccagcatttgagaggctgaggtgggcggatcacctgtggttaggagttcgagatcagcctgaccaacatagtgaatccctgtctctattaaaaacacaaaattagtcgggtgtggtggtgcatgcctgtaatccctgctattcgggaggctgaggcaggagaatcacttgaacctgtgaggcagaggttgtagtgagccaagattgtgccattgcactccagcctaggcaacaagagtgaaattctgtctcaaaaaaaaaaaaaagtgaatttgaaaaattatctagatatggctatttgcttctgatgtaagttacttaaggctgaaacatttttatgattagcatggcaatttagcatggacttttgcacagacaggcctggtcctacttctttagcagtctgtgatttattcaagttacttattctctcataaggaaccattccattcatctctaaaatgggcataatgatgatagttatatcatagagttattgtggagattaaattatataatgtgcatcaaagtgttcagcataatgttaattacactgtaaattcagttattattagatctcatgatttcttaaaataatttcaacatccattttagatttgggggtacatgtgcaggtgtgtcacataggaacactgggtgatgctgaggtttggggtgaagatgaccccgtcacccaggcaatgagtatagcccagattggcatcccttagcccttacgcccctccctagatctcattgtttttcatccctatcttgataattacagctaaattaattttcatgctaacctcataaaaacctattaaattatgagcactgtacttcacatactatcacttcctaagtatgagtgtcatagtagatcacacatggcccatctgtgaaggccctattttaaacactcaatatttgctttgccttttacagtatgatctgcagttgccaaactcaaccctgttggttgagttagccaaggctactgaacaaacacaatttgctgccctctgtaatggacagtggaggagggctttagaagaaacaagccttggtgattatctcaaaggacttgcaatatagctgggagtagcataagaaacatagtgaatttaccgaaatggcctcactgattctttgcagatggagcatttgttgaggcctggacacactcatcatttctggtgaactccacatttttctgccttggagcccttgaccatgtcatttgaaaatcttcaatgcattcttctcactttctctctgttagttaaaataatactcacgcttgaagactcatcttaaatgctttttttgtctttaggttttctgagagtttcttctctttttcctttctctttctaaagtcacttaaagcttagtgtcatagctatgtattctaacaataagaagacgacttttggagagagggttatattttgctgccttgtttctgccatggtatctagaatcggcctttgcatgccagggtcacctagcacatgtctgtgcactaataatgttggaaagagaggacgcatttgaagtgagtcatcagatctaaggtcctggactgtaagggaagtttgaccaagactgaagccgtgttttaaatattagaaaatcctctaacaagcaatgaaattaaaaattgactgaaatatggaattctgtcttctgttttaagaaatcaaaatgtcatagctgttgtcttttctagacttctctctaatgtaatgttagttacaggtttaatcaagaaactattttttttcaatttgaaataataagaaaacttatacttttattctccataattctatgcttcaatgtatctttgcctcagtttccacacttataaaatggaaatagtatttccatcccagaagtttcttgaattaagtgaaataatatacataaagtgctcaaaagaattctagttcatacattatgtaatttctaaatgtgagctattatgctttagccagtttaaacaacgcttttaaggcactatgtttttagtattttaaaatatgattcagctataaataaataagggaacatgggaattaggataatgatcaggattttaaaagcagcctcagcctagtattccaggagaaaaaaattccatggtaaaacagtgtctattcaagcttgaaaggacaggtgccaatgacttctccaactctgtggttccggtagtttatatcttaatttcttataacattgaacattagtattaaaaggtcatttattaaagaaaatgcttcatcaagaattaaataaaattcaatgaatgtaaatcatattaacagcaatgtttggtgcataggtatcatctatgtcaggtaatgaattaagcaggttattaaatctctgcaggctggaaacagcctttgtctatcttaacatcaccttttcattagttcataggcctggaatcctcacgggggcatcaaaaagttgtcaggaggtctctgaattctggagttggtgtctgaatttgtgcttcaggattacgtttcttgacagctcctcatgcattacacagtggaggggaatggcggatgtgtgtgtgcttgtgtgtgtgtgtgtgtgtttacaggtttctcaaacaaattagttatgtacattttctccagaggtggcatacaaataacttgtcagtgaagggtgaaaacatgcattttaggttgcgtcagccatcttgcctctgcattcataagtgggaagacaagattgtctgagttctgatttaataggtttttttaccctcatttgagactacatctctaaggagcaatcatttaatacaaacaaaactatttttctacttttgtgatttatatgtgaagatgcttatacagtaatcccctttacccatgggggatatgttccaagaccccccatggttgcttgcaagtgtgatagtacctaaccttatatatgctgtattttttctatacacccatgcctacctaggataaagtttaacttataaagtagacatagtaagagatgaacaacaagaataaaatagaacaagtataaccatacactgtaacaaaagttatatgaatgtggcctctctttctctcattcagagtttcttcttgtaccatacttattttcagacagcagttgaccactggtaactgaactcgaaaagcaaaaccaggccgggcgcggtggctcacgcctgtaatcccagcactttgggaggccgaggcgggcggatcaccaggtcaggagatcgagaccatcctggctaacacagtgaaaccccgtctctactaaaaatacaaaaaaaaaaaaaaaaaaaaaatttgccgggcgtggtggtgagcacctatagtcccagctactcgggaggctgaggcaggagaatggcgtgaacccaggaggcggagcttgcagtgagccgagatcacaccactgcactccagcctgggcgacagagcgagactcttgtctcaaaaaaaaaaaaaaaaaaaaaaagcaaaacaaatggataagagggtattatcataccagattgttgaatgtatgtgtgtgtgtatgtggacttactttactaacttttaaagttactttaccagtaatttatggttatggctgctttattttataaagatttatgcacactcgctgtagttttttccttcttattgctggtttgctataatttctttacaaaatgtgtccttcttatatcaaaaatatgacaataattttgattaagattaagataataagtgattacagaaaaatgagataaaacccagttgagtaatgaatttccatcttatgaatacaaatccctattacagtaaagtattgaaggggagatggattcatttttgattagattcagattttgtctatgtagttgataatataacaccaaattgtgttctatttaaattcttcttaaataaggcatcacaagaaaatacatttaaaataggtgaacgggctgggtgtggtggctcacgcctgtaatcccagcactttgggaggctgagatgggcggatcaagaggtcaggagttcgagaccagcctggccaatatggtgaaaccccgtctctactaaaaatacaaaaattagccgggcatggtggtgcacgcctgtagtcccaactacttcggaggctgaggcagaagaatcgcttgaacctgggaggcagaggttgcggtgagccaagattgcaccactgcactccagcctgggtggtgacagagcaagactccgtcaaaaaaaaaaaaaaaaaaaaaaaaaaaaaaaaaggaaagaaaagaaagaaaaagaaaggaaagaaagaaagaaataacacaggcaaacaaatcatgatatcctaaagatgtttgactaataatcagtgcctaccatcatatatctaacacatttctcaaagtcagaaatatgcagacagtacagacagagaagatttgacgtataaaactattagagaataattatgtgctggactgtgtgagactaaccatgctaaggatggggaaatgaaaactatttcaagttagataactacctgctttgtaaacctttccctttgacccaattaagcaccaaacattgctgttaatatgatttacatttattgaattttatttaatactttatgaagtgttttctttaataaatgaccttttaatactaatattagatgttataagtactcaaatttgagtacttcagccttcattacagaagtgtatgtgtgtgtctgtgtgtgtgtgtgtgtgtgtgtgtgtgtgtgtgtgtgtaatggggggctatgcctctatggctgtttcgttacttagcaccccctcctctccttcagttgacaaactcctgcttgctcatacctcatcttccctgaagcacccccatgactttgtcccaacaaccatgctctgcaacatttactacagtatttaacacggtttagtgtaattctctatgtatcgatgtatttcccaaaatagaccatgagctacttgagggaaggtatagtattttgttgttatttccaccacatattaaaaggtcaggcacatggacatgttcaattaatgtttgttgactacattaacatgcaaatctgctacagtggtagtattacactgtgctcagggcttggcatctgaagccagattgccatggttcacaacctgactccattacttttaatatgtgtgatattaggtaagtcattttacttttactttctgggctcagggcttggcatctgaagccagattgccatggttcacaacctgactctattacttttaatatgtgtgatattaggtaagtcattttacttttactttctggtgtctcaatgtctcaccaaaaaaataaggattgtaatagtacttatctcaaaagtttgtcaaagtattaaaagagttagatcacatagtgaatttagcacaatccctggcagtagataatataattgcaattatttcgttattttatctactattcaaaaataaaacaaaaacatttggaaaagcagcctttaaagtgttggaaatggcatctcctacaaaggaaagttggatattattttgagataggagcaatgggttcatattgggaccaaattaacaataacctgaagaaacagaatgatggtcgaccatttccactgcaagtttataaacaggttcttcgcatatgccattgaaatgaaagaccaaatgcattgcttttggctcaaacaaaatatagccaatagtaattgctgtgaatatcttgtcatttgaaatgtaaattgaaaaattacaaaaggaaaacatttttatttgtgattatggagttcatagttggtgtaaaaaattggtttagatactacttggggtctcacttagtcatccaggctcgagtgcagtggtttgatcacagctctgtgccacctcaaattcctgggctcaagggatcctcttgcctcagcctcttgagtagctgggactacaggcatgcaccaccatgcccagctaatttttaaattgtttgtagagatgggatctcgccatcttgtccaggctggtcttgaactcctgggctcaagcaatcctcctgccttggcttcccaaagtgctgagattataggcgtgagccaccgcacctgggcttggaataggttttaatattaaatttaaattttctagaatattgttgtgaggtatgacaggagctttgagaaagaatccaatatagtattaacgttttcccaaactttaagaaggccacttacaattgtttctaattatttcagaatttgttctttaggggattctagtaagcttttgcacataattgtaaaagagaggtgttgtgggtagaatcatatgtggcctggaagacttacgggaagaaaggaaaactgtaaggtgattaaaaggttaaaaatatttagctttctagacaaacatgccactaaatgaaatttgcaaatggtattaactctgggagaaatcatatatgtagatgcataatgtatgctatagaaaggtaaacataaatagtattaaattgtatatctctttaaaactttaagttgcattgaaaagcatttcagtctcacaaaatattcctctgtatttttgtgagtgtgggaaagtaatctgtttgatgcatttacttatcaagtggtaagtgacttgattcactttataaagggacatttaccatggatgtaaagaattccagttgaggcaagaatatatccatctccctgatctgataaggttaggctccaaaaatatattcattaagttaacatatcttaaactaagtttaatataatacttaatatattctaagattagtataactaatatacataatggattttaaatatcttcttaacttagaccttatgtatattctaaaaaaggggaagaggacttagaagctttaggggcgagggcgagggcgagattatcccaactacctacgacaggaactctctttagtattttaggctgtcattaatttttaacacttaatatacaaatgcttaagagtggcttagttacattccaatgtgttttaattctttctttgggggtaattccttattcagtatgtagtagctccaactgagctggagacttcagatattttgtctttggctttttaaacaggttttatattaaataaatttcttgtactattttggttgtatacagtgtgacttttgaggtcagaggccacaataatttatcctcaccagagtagctaattttaacttctgtttattttttgttaacgatgcttttagtttactgatattaatttttttgataatggtgaactcttgcatttcctctggtagagagtaaaatgtttcaagttagatgatcacctgctttgtaaacctttccctttgacccaattatttcttacattgctcagtattcaacttttacagaatttggtcaaatatgtatgcagtaatattaatagataatggtaaccaaaatgatgaggacatattggtgtgatgtaagggtaaagccccccattctggcatccggtggaatatgtgaattgctgttttcctaacttttggggaataattctcatgtgccctatgacatatagaacatggtttggtactgttgagagatgagaaattttcataattcaaatgtaaatcataccattgattatatcacatttgtttagagcacaagtctttaaacaaacaacaaacaaacaaactcactagcaatggcaggtttcatggtgaactaagtttagtaaatgcctatgttaccccattcttggaaatttgtaatgcatattaatatagtgaaaactctgataacttgccccagtaaacaaaattaaaaacttcaggaatctgtcaagttcttccacaaaacatacatatgcttagtagtttaatttgaacacagaatcttttaattaaaatatactttaactttttccccagggaacatttgtattttgcatatttgtgtatgtatttattcatttggtgtactgaattacctgccatgttaatagttgagagagtgcttttgtgcttgtgagccaataagctgaaagtgttcacaaggtgtccactggtgatatttgtaagcaggtgccccatggacctctgtattttggtgagtgtgggaaagtaatctgtttgatgcattagttcatagtctgtttgtactgagaagtgcacatgactgggacacacaactacacagagaacactaaaagtccaaacaaatgtggaacgtgagaatgaaaatatgttcacattagtcaccattttaaaaagtgtatccctcaaagctttacgagcaataggaaaaaatttgcattagaagggaaaataatgttaatcatatagcttctggatgatttggattgttgcctctcaggaaactgaaaaaaggaaaagttcaactaacaagttaacaacatctttctaagggaaaactatgcattgataaactgaggattccaaatcagccgcttcttttggcgaaatattgatatacatacattaatcttaggaagtcctttatatccttttgtgctgttgggtctatttcctgaggtttatttaatctagacgatgtcagtgattatttgtgcttttcatagtttatagttctcacaaggataatatttttgtttataatcatctgctttttagcagatattttagaactcaaatggaaaggaaagattaaaaggacaattatatgtggttaattatatgagatagaggcaaacttcaggcactaataaagtttagctagggtcatgatttgtccacaatgaagtctctgaaaaatatgatccaagttgttgaagtcaaattagttttaaaagtttgttttatgttggggtgcggtggctcacactgtaattccaatgctttgggaggctgaagcgggtggatagcttgagcccaggaattcgagaccagcctgggcaatatggtgaaactcgctctttacaaaaagtacaaaaatcacctaggcatagtggtgtgtgcctgtagtcccagctactcaggaggctgagcggggaggatcacctgagcccaaggaggttgaggacgcagtgagctgtgatcacatcacggcactccaacctgagcaacagagtgagaccttgtgtcaaaaaacaaaaatttgtttttatgttttaaacataatgtatgtttatgacagagaaacgaaaatcttcatatgtaaaaaaaagtaactctccattcagagttcaaagataagcattcagtattttagcatatttcctttcagtctttttttctatgtatttattgcttcctttacttgatttctgtctcatgtgctctgatacgcccatatctgcaggtttgtatcttactttttcatgttacttagaaagtaagcattcctgtatgttaccataaacttataaacatgactcttcatgattccataatgttcaagtggctatgcaaatcattaagcaaattgtaactttcccatcagaaataaattatttatatgtgtatatatataaaatgtataatataaacatacatacatatataaagtttacaaacctcttggttttgtaggagcagtttcctagaaaaaaatatgcagaatataaccacagagttggaactttccttgcgtaaatagatcggagagggccaatgaactcttgcagatcagcagagcaagttgctttcactcgtaaatgcttgtttgtgtcccaggattaatctcagtgctcatttgctgccatgtatccttctgctgcacttaccccacagattatttaattttattgtccttcttatagaagggcttgtgtctttattattgaaaccctaatgtctagccctgtgcttatatacagtagctcttttctcttgaataaatgaatgaatgaatgaatggttgaatggaacttttctttcctttctccaggcaggtaggatttggacttaaaatttctgctgggcagctactttcacattttccaatgtgtagacaccacagtttttgtttttgtttttctgaattttatttgtttctctgccccaactcttagaaagagaattaagcttaatttctcaaaaactactgaagagattaacaaaagatgatgtccacaaagaagattggatattgaaaattctataaagtactctaacatctcttgctcttttgcactaagcttcttattaattactatcacttttgttaagttcaattttgacttcaccttaaataaaaacaataaatggacctggaaaagttagtaaacattatacagttgtaggagagagactgaaattagcatgagattgatttagtgttataaactaaggaaagaagacccccctggcgatctgtctgtgtgtggcgggttgggaatgggagtgggtgggaaagctttttatttagaactgcaggagaaagtgtgcttgggtgagttccctagtgtttgggatattaaatgtggatgtggacatctctaagctattgctttcctcttttaatgcagatgtttgaaaatactaaagcctgtactaaggctaatgcatgaagctggcaaaaacaattaccaaaatcataaattgtgattttattcaagctattaagtgtaattatttaagtgaggtcttccgtttgattagagctaggagagttcagcttgctctaatcctctgggatagaaatgggtcgctcttatagaaaatgatgggttgatagtggctactattgagataattgaacattccagaagaaaatgcttttttcattgtttcgcttcctcttttcagttaagtttttgtttttctaagtattttctttttaagaataacttatttctaacaaagatacaaaacacttcttaaagaaatcctgatttaatcaagttttctaagttaggtagcttggtcaagtctacaccttctagtaaattggtagagccagtatcacagctggatcaatccaggcaataaaatctgtgattttggccagagtattactcatgttctcttggaggttccctaaaatgcctttgaaagaaatttaaatattcaattattttacagttatcttccctgaagtattcaaatcccctaggagttaatgaccaggattgcataaggataaaatatcaagcctgtcaataagggaacctaactgtaggttgtgaagggatagagaaaagtcttgttaataaataaattttccaacttctcctcagccaagaagttgggaataactccaacgagaggttcatagttgttgtcctgttcttaggcaaaagaataagtgatttacttgtccctacaagtattttctttcagtccctttcattcttcgcaaaggcatctcacctaattgaaagtagtccccagtagggtgttagctgatggctttagggtgttaccaccaccaagagtatttgcattttaatgaaaggttttaaaagaacttaaagcttaaagactgaaagcaataaatctctattggtggaatttgaggcaatgtgatagattgggcaggagatatctgtggtgaaaggagcccaccgggtctattctaatcacagcgtgaattaaagtgttcctacttagtagcctcacttctacttccagagtgagggctgtggggacaattcctgtggccagaataataaagtactcctaagtagtttgattttctttaaaatcaaaacaagttaaagggctatacatttcaaatcttttaacttccttgttctttcccactttttctgtagcatcttgcttgagatttcccaaaccctctattctattttctctgggcttgagaagtatatttagcattacgtttcaagttagagtttcaaactcattctgtgccttacttttcatttcttggaaactttatgaccctggaattgataaggtagtatacttgaaggatttgggagaaatggctttacgaatagggttattattattatttttattattttactacatagagtgaaccagacactgagctacattttaaggacacacagatatattttgtgcaatttctgtcaagtagccttgggagataagcaaataatccgattattgcaatcagtgcaggaagaattataggttccccatgctctatcgtagagcacagaaaaaatactaactagaagtggttggtaagaaggatgattaaagtttaggcaggtttagtcagataaaacaggaatgaggattggttggcatagaaaagggctttgatggcaaaggaggcagcatctttaaagacagtgtaataggagaccagagccactcaggaaactgttaagaaactgagtagggccaaatataagctatgaatgtaggaataaagtgttgaaattggaaaagccgtcagggaccaaatattgaaatggctttgatgccatttcaaggattgtgaatccagtagggaaccactgatatctttaagcaaatggaaagcaaggtcaaatttgcattttataaaaatccttctggaattagcatggagagttgtttagactctggactctagactctggagtgggacaaaattgaatgtgtgtcttggaagagtttggaaagctgtaaccatgtatcaagaaatgagggattgatctggaaggtaggagtggggatatagaagagaaaatagattagaaaggtaacctcagaaagataatatttgagtatataaaagaaggaaaagacacaagtgactcctggatttttggcttagtcggttggattccatttcgctgaaccaggggaaagcaaaataggtattaatgggatagatgctgagttcagatttagacaagctgagtcttagattattatagaacatccgagcagagatttccagcacataagcattcatctgtctgaatcccaggagaaagatatgggctatagatatatatttagcccttagcccttagcatctaagtgatgctaatagaagagatcactcaaggaaaatggatactatcagagggctgttgattgaccacagacaactaaacaagagttaaaaagccaactgagaatgagcagcaatcatgagaaagtaataataagaggaagtagcttgagggatacttcaagaacaataagcacgacaatatccctatgggttaagaaaacacaaagacaagcaaacagtcttgctcgttttccaacatcctccaggatctagccctaggcaataactctgaaagtctcaatcactgctcctcttcctatttgacttgtttcagctcatttgaaacaatcctgtatatccatacatttttcatggtttcatttatttctcacattctcactggagtgtaattttcttttattcttttcttctccatggttaattcttcttcagaattgtcttctaatgttcccgctgccttcttccttcctatgacatggtagtatcatcatccatcctaacttccaattagtattcagattgcaactttcttatgggatttagcactttacaatttgcatcatagttgtttatgcaccagattcttcccctttggcaagaatacaaacttctgaagtctaagaacccgttctcctaaattagcctccatagtgcacctctttgaaaacagcaggtacttaataattatttgctcaatgaccacaaacattacctacctaaattaaatagataacatctttgaatcttctgataagtctagggatctcagccaaggcaaaacatgaaaatgcttatttatgaggttatatctgttagttttgaaatatctaggcacgttttggccaaataaatgatgggagagcatttcataaagcacatttatgatacagaggcagaaagtgaaaacacaatgctaaaactttgttttcaaaaattgtaatattatatactttaggttgttttccattaatgattgccaatagctgtctctacctctgcttataactgtaataattaatcttgtgcaataggcatgtaaagtacagtactgctaaaacacaaggtatttttatttatcctaaaggtacatatgagatgctacactggcagttccttaatgataccctacaaataatcctaagcctttcaagtatattttagtatattaaaagtaagggaacttagtgggggatgttcacttaaatagaataagggttaaatgataacttgacttatcttttaaatgacaaaaaataaagaaattgcaagaccttttcacacattagatatgtattgtcatttatcatctagatatcaggctagcagtgcgaagtaataaaacatatcatcgaaaaatgtgctataggtctgaatcactctttcattccacctcccagctaactgtagtattaaatcaaacaagcagaacatttccttaggcagccattgccttttaatttcctgaagaaccttaaaatatcattcattacaagtactacacatatttggtttttaaaactctcataaatcaatagcaggctgactgtaataattattacaagttagtgcataattttcgtgctgaaggctgcatgcagaactttagcatatgcaaacgaggcaattcaaactgtgtatagatattaatatgaagaagcaggtaacgaggtgcaggctatgaattatgcatcaggagtggctgatcttcaatgaggaaaatgaattcagcatgtaatctaattagtgatggaagtctattacatctaactgcaaaagcaaccgtccttgaaacaaatttatttacagtccatgttaccacttgaaacaactttgaaatgatgtgtaagacaatagcttaattgtaaaaattttttgtttgtttgtttcagttctagacctggaaggcctcctaagaggactcaaagtgtcacctccccagagaactctcacatcatgccgcattctgtccctggtctcatgtctcctgggataattccaccaacaggtaagactgctactcacttatgccaaaaaatattaaaaatcagccaatgtcgtagcttttatatatatctgtggtgacatcgatatttacacacatcaattatattttgtgcacactaagataatgttactgagataatttatttcaaaactgcattatgattaccatcttttctttatttaaaataaaataaaagctgaactgagcacagtgctagaaattattttaattaatcctaccacaaatatcaaacatcaaattattattcctattttcttattaaggaatcaaagttcagagaaaatcagtgactttctcaaggtcactcagctgtagctgtcagtggttattcaaacccaagtctttggattttaaacttgtttagcattccagaaattgatagacatgcatccaaacaaaagacagtaactgtattgaatagaaatgtctcgtaatttttcacaaactaatacgtttctattagaacccatttgaaagatgtttatttctagaattttgaaaatgtataagtaaaagaatagtcttgacttcataagctccataccataaagaaatttcataatgcactggagcaaaattaattcgtttgatttctaccccctgaatgggttcattaattagattatttacataaacatatgtttgcccatctttattgtttcatcaggaaatgagccagatccatgagcaaattgaaatattgctgatattattatataatatagaatatttatattaatgttttttctttatcatatgtctattaaggaaatatacataggaacatataaatgtcatgtattataatacagctgatacaagaaaggtaatcaggcaagatgagagtttttcttttttctctaaattcctgtatcagtattgtatttttctttgtaacatttgtctttctgtgtgctctgatataatcatggattaatcttatttcatatgtcataattgggtggaagtttcttgacatcaatgactgtctctaactcatcttcatttttgcagtaatgtctaaacagttcattcacctttgtggatatttaacaaaaatcattgagtttaatttgtagctatttcggctatttgttcattttatatatttaatatttttttcagcaaggcctcaataattttaattttaattttaatttttgtttttaagacaaagagtctccctctattacctgggctgtaatgcagtcgctcagtcgtggctcactgcagcctggacctcctgagctcaagagatcctcccacctcagccttctgagtagctataactacaggcacaggccaccatgcctggctaatttttgtattttttttctagagatggggtttcttcatgttgccctgtctggtcttgaacacttggactcaagtgacccatctgccttggccttccaaagttcctggattacgggcatgagccaccatacccagccaccaaaggtttttaatagtaaataattgaaaattccatgaaaatatttttatactaatttcatgcatgaaaaattgagatatagaaaaatgaaatcaatagctgaaaactgcccaatttcaaggcaactatcgtcattttactttatttaatcatgtttttcaagtaactgaatcctactgcctgatattctaattccaatttgagatttggaaaaatcaaataggtagtacgttgttaatccttgctcatttatgtttaactgaatgataaagatttctgtttagaaaatttgggacttgggaattacataggaaaatcttttatactacatatgaaaatcttaacttctcttttccgtttttttttttttttttttgagacggagtctcgctctgtcaccaggctggagtgcagtggcgcgatcttggctgccttagcctctggagtaggtgggatcacgggcatgtgccactacgcccgaattttttttgtattttagtagagacggagtttcaccatgttggccaggatggtctcgatctcctgacctcatgatccatccgcctcggcctcccaaagtgctgggattataggcgtgagccactgcgcctggccaacttttcatgttttatagctgaaagactcaagtgtgaaataaaaaagacctcagagtctttgtgacataattaatctctcaatgaaccatgtttctgatgttttttttttaaataaccattttaataatcattttttctgtatttagtaaacttgtgttgactctgaattgttactttctcacagttataagagaaaaaatgtatcctagattgtattcatattataatagggaagatttgtctgcccatatttaatcttttaagatgaagatgatacatagttcattaccaaagtaatgattaaataagatgataccatgaaaatgtaaatagcaacacctcacataattaacaccatcaagtaactttcgggtaagtaagtggagtttctaaataaaggaaggtcatattccaaagtcccaactcaaaatattaaattattttttgaaagaactctttctgaaatgtattatgcacttgccggcttggtgaacagagacaccgaagatactttaaatttggtctttcatttttaaagtacgatcattttctgtatttcaatcactgtgccttctcagacattctacttttgttctttcctatatgttttgaacccagaaaccaggacttctgtcaagctaagcattatatcgaaaaaagaccttaaacagccatgttctaaagaagaatgaggaaatggaggctcattaggagcataaactggattagaaaggggatgttaggctgggcccggggttcaggcctacaatcccagcacttggagagcctgaggcaggaggattgcttgaagctaggagttccagaccagcctgggcaacatagcaaggtttagtctctaccaaaaatcaaaacaatttggctgtgtgtggtggcctgtgcctgtagtcccagctactggggtggttgaggcaggaggatcacttgaacctgggagatccaggtttgtggtgagctatgattgtaccactgcattcaagcctgggcaacagaaagagaccctgtctgaaagaaaaaaaagaaagaaggaaagagagagaaaggaagaaaaaaagaaggaaggaaggaagaagggagggagggagggaggcagggagcgagttagtttagtgccctgtagacctcagcaaactgctttagaacagggtgtgtgagccagctcactactattttgcttactttcaactttcaaacattagtccaaagattttaggttgccagaagtttgactattgcacatgaatggcgttaccttcatatattcagtatgatttctctttttatgtaaaatttttctagatgcagaagtttagattttagggaatacagagtaatgccttcatatactggggaacatatctttactgtcttaaaacattaactggaaatctaatgatcctaaatacattttataattctcaagaagtatataacatctttctcccacaacagtctaccgaatgctttagtgtatttggggaatatgactaaatatgatcatatagacttttaaatttgcaggactttatttatgtacttttgtattctgagaagtaacatttgaaaacgataaaaagatgtaaatatatcttcaaggttgcctaactttgtcctgtgaaaagaaaatggattaatttagacaaatttataaatacctattgatcggctagggggcggtggctgatgcctgtaatctcagcactttgggaggctgagacaggcggatcatgaggtcaagagatctagaccatcctggccaacatggtgaaaccccatctctactaaaaatacaaaaattagctggacatggtggtgggcgcctgtaatcccaagtatttgggatgctgaggcaggagaatcgcttgaactcgggaggcaaagtttgcagtgagccgagatcgcaccactgcactccagcctgacaacagagtgagactctgtctcaaaaacaaaacaaaacaaaaaaccaaacaaacaacacctattgattcagtcctaatcacttttattgtttcttttcaagaattgaacattggagttaaataatagttttccctggatgcatttgttttcttaggaaaaaaaagactttttttaaaaaaaatgtattttcccagtcttaatattaagtatttaggtatctatacttgaaacaaaaacaaaaacaaatacaaaacaaaacaacaaactttgagattgcttgtggaatttttatgtgttattttggctgcttgagtgggcttgtgtgtaaccttagaaggggtgtgggcagatggtgataatttctaaaagttatggttgtcaccggatgccatagcaaccagaagttgaagttaatgaaagaaagaaagttctttgtagagtcacacaaggcaatacctcctgctgtggtcactgcatttattttgactgagcacttgtcataaatcatttttgataataactaccagtttgaaataattcatcctagcaacagacttccaataacattcatactttttataagatgacgtctatttaaaattaagaaaggggttatttaggaattcaaaatactcccctcttgtccaggaatgcaatttggatagtgtatttgccaactttctgatttcatctttaagtcagtatgcaaattaattttgaaatacaattttcataaaaatactaagaattaattgagtcctcagtatttgcctttgacatataaaaattatttagtatcttaaaaatacactcaaattaaatgaatgaatgatttgtagttttgtctgttggatatgtcttttccctcactgtgatcttgtagacatataactaatacgtattcaggtaaagaaagcaattctacacacataccttatgcttaaaaggtaagaatttataacttgcaaatttatcgttttggaaaaaatactggaccggggcaatattaatctagaattaatcccattgaaacattcttatctttaaaaaaatttagagaaaaatgttctcatgtagtgaattcataaacatatttcaaatttaattttctttttttctactaaatagtaaacagcaacaatatctaaacaacctcttttgtaatattagcatttgtaatagtttaaatgcattaaacatttcaacttctcaggagaaaatttacaatgtaaaactgtgcctaggctgggcacgtggctcatgcctgtaatcccagaaatttggggggccgaggcgggtggatcacctgaggtcaggagttcgagaccagcctggccaacatggtgaaaccccatctctactaaaaatacaaaaattagctgggcatggtggcaggtgcctgtaattccagctactcgggaggctgaggcaggagaatcgcctgaactcggaaagaggaggttacagtgagccaagatcacaccattgcactcaagtctggacaagagaacaacactccatctcaacaaaaaaaaaattgtgccttgtatgttgagaagtttattataataaatgctctgtatttcattgggatactcacaagtaaggagaacacaaaaatgcacaagtataaaacagccgcaaattgttggattgtcttcactaataaattaaacataacaatctactgtatgccttacccaaagaataaatctcatatttactatttaaacacttgatgtttatacaatgtttgtattttttttatagtttaatgtattttaatagcaaacttacaggaacagcacagaagacagacaacattaaaaacatgtacttgcatgtagtacaactcagaaaagtatagtgaatggatggaatctactgtatgataaaaatgctacaaacaccatttagttgccgtcaataagaagtttacttgttttaaaaaaatccaaatgctggcattgtccagaaaaatttaacaggtttatttatgattattataaagttgaaccgctgaaacttgttcactgaaacattttaacttgcattaatgctttacgtctccacatttatattaaaaattcacacacaaatgaaaacggaaaaactgccaatacctgatttctgtcccctatttttccactcgcaatcatagacttaggtaccttttgaccccatggaaaaaaaatatctaacgttcagaactaccaataacaggaagaagagaaaaaaaaaattttttttttgagaatgaaatgtttcccatcatagtggattcttaagcacgttctccacgtatgcggcgtgctagctggatgtcttttggcataattgttacacgtttggcatggatagcacacaggttggtgtcttcaaaaaggccaaccagataggcctcacttgcctcctgcaaagcaccgatagctgcgctctggaagcgcagatctgttttaaagtactgagcaatttctcgcaccagactctggaagggaagtctgcgaatcagaagttcagtggacttctgataacgtctaacttcacggagcgccacagtaccaggcctgttacgatgaggtttcttcacccctccagtagagggcgcactcttgcgagcggcttttgtagccagttacttcctgggtgctttaccaccggtcgatttgcgggcagtctgctttgtacgagccgtggtacagagacctccttacttaccccccttctccttcggctggagctcggcgagcgagaggcggcgctggcgttggagagcgacggcagcgcggtggcggctgcgaacaccgtttgtatgtgttttcatatatttatatatctaggaaatatttgagaggtttgatactagacattttgttgaggatagcacatttaacctataactacttagtacatgttccctttgtacttttcttgaagagaaaaattaaagggtatgtcttcttttttttttcctttttgtaaggcccacctaaactttagacttcatcatgcaatttatttagttttcaaacttgaatggagcactctattagtttcctgtgcctgccgtaacaaattaccacaagcttagtggcaaaaccacaatttatacttgcagagttatggaggttgcgagtccaaaatcagcatcactgggctgaaatcatggtgtcagcagggtaccccctctggaggctctaggggagaatccagtcctttcctctttgagcttctgggagctgcaggcatttcttggttttgtggctgcctggctccaatttctgactctgtggtaatgtcgccttcgtgtgtgtgtgtgtgtgtgtgtgtgtgtgtgtgtgtgtgtaaaatctccctctgactctcttttaaggacacttgtgattgtatttaggctacattagataatacaggataatctgtcttaagatccttaatataatcacatctacaaataatttttttaaatatataaagtagcattcacacatttcctggattaggacatgggcttaattttggaggccattggcagcctacgacatccagcaagtcactaggctaagtattatgagaagtccaggtggggtatggtagatatgcacacagaagattttggcctattttattcactttggtatcactggtgtgtagaatattgcctggcacagagcagatattcaaactaaatatttgttcaatgaatatggctaataaatgtttagtaaaggatttctgagagaaattattatgccttacaattacaaatttaaacactggtgtgttaatgtagcttctaaaatcccattaagcacagttaggctccagattaaagatgcagcgtgtagagcctaatggaagtatactaagtgtatggaaggcattatttgtttgtttataggttatgatggttacatttaagcataatcatcaattgatggaatttaaatctctaaattgatgctctagagaagtgatatttatagaaataacatagtagcatggaacatattactctttttttattattatactttaagttctggggtacatgtgcagaacgtgccggtttgttacataggtatacacgtgccatggtggtttgctgcacccattaacctgtcatctacattaggtatttctcctaatgcattctctcccccagccccacaccccccaacaggcaccggtgtgtggtgtcccccacccaccccgtgtccatgggaacatattactctttacaattcctgcatatacaggtatatataactacatttgtactatattatataatcctttaagattagaattttcattgtacctccagtatcttgatatataatttaatacatataaataaaatatatttcttaagttaactgaatgtaaatatagctcttgttatgatgaactacagaagaaatatatttacttctttttcctatgtaacatgttaaaacagagtacttctgttaaatcacaatataccctgggtctgttactagcatagatattcataaaaatcatttctttcttatctcttagagcaatgatctattatttttagacttaattaaataaccacatattactagacttctggacagtcctctcatctacttaatttagaagaaaattaccatactttcttccctaatttatttctctcttccaggtttctattgagttctgtagtctcttttcctacactggtctgcactaagaattacaatctgcttatacttctgtctcagtagatttcccataatgaagttgctaatgtccttaattgagtaactgcaaggtattatttgcttccttttagtaatatgatgccccctttgacaagagaagtttacttacattaagaaaagcaaatcagattttcagagtcaacttttgattatgacagtggacattgtatagattacctggagctttgtagcttcacagatatccatttatttgtgaaattcttagtgttctaatcccttggttacattgtggatgtgccacatgttgtcttttattgctcgctataattttttaaccagtaggaggtgcagctggtatcttacgtcccttcctaaccaagaaatgcgagaaatacaaatattgtttattttagtgcaaagcaagataaactttttttatttttatttcgtttatttatttattttagcctttccctttgataggctttcctctctgaagctagcctcaaagcttcaactccttcccttaatgatgtgctgtaggttagttattaaagatttaaccataaaatgttggaacttctttttattttttccatactttttggggataagtttcagaactttactctgtcctttgtaaagatgtaaaattgctatgaaagggttggcaggaacaacatttctagagaagctggcaaaagccagaaagatcatagtgtttataaaaaaccttgcagtttgtgtcccaaaacatttattatcctacttattcattaacttaagaactgatttaaacgtattctgcatgtaaaatgatgaagaatttcatttggctctgtaaccatataaatgaacattatggtacaactttggaaagtgctaatataaacctaagcttaatagatagaaatataaagtccagataaatggaaagaacagtactattttgctctacacttcagatggcatctggaatattatgttcagtcatggcaccacaatttttagtaagacattgacaaacttgtgagcattaagagaacagtcatgctgatagcaatttggaaatgatggtgatgtttagtcttaagaaggcttacagataatctgaaagtggatgatacaatagaatcatattgtgcacttctgaggacagaaatctgatagaataaattgcagagaagtctacattggcttccgtaagaaagagccttgctgtgtggagaactgtcagaaagtggaatgtattactaataaaacctcaaattttccttctgacagaaatgttcaagagaaaactgggatgaaaagttgttagccacggtttttctattcaatttatttaataggctatattgtttatgttacaaaacaatacgatttttttgaaaacttattctccctcgctaaccatcagctgtaaattttcccactttagaattactgttgttagttaaatttgaaggcaattttacattgagagggaggtaggttggggaagaccaccttgttcccttctaattatgaaatatgtggattctattttattttacttttaatttttctcccaaacatgacatggtgtctttctagttaaaaggtgcctgttcatatattcattcctacttttttgtatggtaacttaaaattacttttgagatgcatgctttatattcttaagcaatcgtacttgctacactgttttttatggatggaatagttagcttctgaataaaactgtgactatggtaaagctaacggatacttttttttttccaattgaaagagatttttacatatattttttcttttgtcctctctccctttctttcatgagaaaccctaaagggttccatagctgtaaaattagtcaataggaggaaatggcaattattgaatataatataaagaaatatttaaagttgtgatagggtttggaataaggatgaatatgctgtattattttaaacagtaaacatcatcagaaatgataaaacaatgacataaaccctaaagatatttaaatgaaagaccttgaactttacttagaattattttgatttgactttctgatttaaaaagtaaagtcccaagagagaagccaatcgccaaaattcataggaatctttcaggcacatggtttttaaaatatataataattgagccattcaaatttttttgattcttcatttctttcacctgtaaaaataatctttttattacatcaaaattatgcttctctaattgtcatgaatgtcaaatgacacaatttatagtaacatcttgtaagtgatgaagctagacaaaggtaaagtattattgtaattaggctgatcccagtcttattcaatgccattgctaactttctttgctcaaatcaactccattggatttaaaaataaagttaataacttttaaaatgtatagtttaggtataggaagtcttagtttgtcaagctattcatattcacatatactctatagattttgctaatagtattatttcataacactgaaatttggttatgaaatgtttactttttagggacttaatgacactgaactctctttatagacttgtggacaaaataagttttagggatataaaatgtcattgctactgttacaatatatgttcaaactatcacatattgctttcagaaatatgcacattacaaatggtagtagaccttaaaaatggagattgctttcaattgattatggctgtatgctgagctatttaattgttggaaatgaattgacatattgtaaagtaaacaatgaagctgattttcaaaatgataaaactgtaacctaattcaataaattgaatcagattacgcaaacgtttttgcacttcattaaggaattagtcagtataattaatgggagagctttttatcatgttcacgtgttgatatatggctgaagatatatacagtagactaaactatttgaagatcttttgtgccatttcacattaattaaagttgccacagacctaattcctagaaaatgaataccatggactttttttttttttttggctaatttaggatacaatgagtaggtcaggctatgactcttttctttaaaagacatttattgatttttcaaacaaaatggtattgtgagttggctcctaacttagaaactaaaaggtctggcctttattctcttcctcatcgcttgctagctgtgtgacattgagtaacactacctgccctcacttgttcagccattacaggtaggaattggtacctattatgttctagtcaatttaggttttatgatcccagtttattgattatattcctacatcaagctgccttctgaaatacctactttatcatgtaaagaccaccatcataagttctgccttatttcttactcaataggactttgtgaagaacatagtaagcgaatgcagcagtccccaacctttttggcaccagggactggttttgtggaagacattttttccactgatgggggtgggtgggaagtatggttttgggatgattcaagcacattatatttattgtgcactttatttctattattattacattgtaatatataatgaaataatacaactcaccacaccatctgcaggtgatgggagacagtgacagatcatcaggcattagattctcataaggaacatacaacctagatctctcgcatgtgcagttcacaatagggttcctgatcctatgaaactctaatgtcctcactgatctgacaggagatggagctcaggcgctaattcaaacaatggggagtggcttcaaatacagatgaagatttgcttgctcacctgccactcagctcctgctgtgtggcccaggtcctaacaggtcaaggacccatactggtctgtggcctggagtttgggtacccctgagctaatgtgatcacaaaacactttgcaaagtgtgacatagcaagatgccatccgattcagagttttatgatgatgatttttaaaacagataatttgctttgtttcacatggaataccagttatttatctctctatttgaatgtttgaatatatcagttctgggaattatgggttctttcccatatttatggcatcaggttataatcatttcttgtttctttttttgttttttatttgagacagagttttgttcttgttgtacaggctggagtgcagtggtgcgatctcggctcactgcaacctctgcctcctgggttcaagcaattctcctgcctcagcctctggagtagctgggattacaggcgcccatcaccatgcctggctaatttttgtatttttagtagagacagggtttcaccatgttggccaggctggtctcgacctcttgacctgaagcaatctgcctgcctcagcctctcaaagtgttgggattacaggtgtgagccaatgcattgggcccatttctttatttttaaaaaaaaaaattttgttttgtatttttcaattagatcaaataaaatatttttttccctgatacagttctcttatgtcattgatttgtttttgtctattatatatagaattttgtgattcatatttaacttactggaatacatcctacatgactttttgattgaatatcattctattcagataaaacacatttccattagttttcatttcagaaatgcaataattttggagagactatttttctaaagatatatatttttaattatttgagcttacttcctgggatgtaaggatataatttcaggaaagagtgttgagtttttaaggattaaaggggatgtaacactctgtttattccaaagaactatgcaaatgtaagttattattttgggtttaatttacaaatgtgatgctatattatcaagattatctttaaacatgtaaaatgtttaatattaaaggcaataaaatgtttagttcccaaagtaaagcattattccttaaaagtcaagttttggacctattcgttttcctattaaaacatctattttctaaatttgaaaatgtaacattgtgaaagtttttcaaatgtatccctctatttggataccttcatttatctattaaagcagtaaatgccctttgtattatctattatcttatattgcttaataaaattcttttagggaattaaattatggagaaatgtttaagtaggattccatggaaccatgttgattcaaatgaatataaatgcaagtatgtctaaattccaagaaaattaatcccttagtgttacaatataatgatattttgaagttatttgagcatgaaattcatctcatcatacctaacctttaagtaacttattgaataaattaagtttaaggatactattccaaggagaacctgttaccatatgacctgtccatatgagttgtctttttgatttataatggcaattgctttctcggcatggatttcatgacataataatattctatgaatttttgaaattacagtgagttccacatcaatcatctataataaaatactatatgtatcaatgagagagaactattggaatatagacattttagaaatatgtacttcctccaaataccaatgccattattttaatgaaatggggtggtttgcttcctttgattttttaaaattgatcataaaaactgtcagcattatcactcccattagcgtatcatcccatcatctgaacagcaatcttcattttaccttgaatatgttgactgtctgtccagcaaattctgcctagaccacttttgatcttggcctgaattccagagaatctattgcttctggagtttctatgcattaatattttaaatttcaggattataattaaacacatatgtcatggactaccattatctggccatgtttcttttatctgtaagagattcagagagatttaaagtgagatcttagtcatgtaaagaattgactgtgctgctgtttttttctcagtttctctttaaaaaatattgaaaattccttgttataggccttcatgtgtacatattcctattctatatgaaaaaacctgtacataaaatttgacatctgcagctgcttcatttttttgtttttatttttatttatttattattttgagatagagttttgctcttgttgcccaagatggagtgcaatggcatgatctctactcactgcaacctctgccttccagattcaagcaattctcctgcctcccaagtagctgagattacaggcacacaccaccacacccagccgattttttgtatttttagtaaaaacagagcttcaccatgttggccagggtggtctcgaactcctgactcaggtgacccacctgccttggcctcccaaagtgctgggattacaggcgtgagccactgcacctggtcgttttttacttaatatcactttttgctcctaaaatgtcatatcaactagcatgcagggttctttattctctggacatatttttatgtcatcttttcattactgattattacatgttcaactgatttatttttataataaatccaataaaatgcataagtttagcatttcataagtagcatagttggaaacccaattagtatattcaaagagaatattactttttagaaataatttttaaaaggcttattcaaatttataattctcaccatatgggttagaatagccatggccatattgcagatgcagaccacaataaagaatattttgacaaatgaaaaatatttgaaatttgcttccaaataattgcttgagcttatctacatagtacttctcacatctcttttatagatattcttgcatttataaagcatatttattaagactttgtacataggatataatcaacagaagtaaaaacaacttgtcagttacatttgcatttaattttaaaattccaactacttttatatatacaatcaatatttatgtctatgtatatttttttaccactgcatcttctattgctagcgtagtttctggccaaaatgttgttaaattaaatatgattccattagtaagtataataaattggttaaaacaaaaggcactgcaaacaattcataactaactactacatggtaggaacattgctaatagctaatatatcatttcatttatttctcgtgtcaatttatgaaggaggtgttgtttgtctcatttaacagatgagtattaaggtacacaaaatttaaatagtctgctcaaatggaaatgaagggcccaattggggattgaattcagtgataaataattataaatcttgttttcactatcacttatgctatttccaaggaatccattaatctctttaggtaacattcatattttgatcagaattgaaagaagatgaattgaatttttcattgataaaaaattgttagatgaactttttaaaggacagggtcaaattttaaaagaacacctcagattttcattagcatgcttaatcctaatttcagaaacttcttacagcaccactgcatgtattggacatgtaagttaaattattgcatagtaggcgttttggtcactagtttacaccataatatcttctagatagtgttttatttctctcataatactggtggaaagcttaagaactgttttaaaatagtttcattttgaagatttatatattttatagttacattttaaagtgttgagatgttcagtctcatgattttttggaggtagggtatatgggggtagcaaaatgatagattgagagatcttaaaaattatatttccacattattgaccaagcttaattcattaatattccattatgtttgaattttagttctaacttagctattactttattgagtgtggaaaagtctactaaactttttttttcttttacattgcactttgtttgctaaataatgcagtactaatagactgacaaatgttttatgctattagagttatttctgaacgttataaatagttcaacacattgtagtgttagctgtaagtcccaagcatgctactttaccctaaataattgaaaaaataatttcttaacttttattaataactcactcttatagtcttcatttaccctattgctcattagtagtaaatctctgtgttattatttatttgtgcaattgataaagctcctggtcaaagcaatgtcacaattggcatccaagggaagttcagcataagctctttggctccagaaattatggtcatacttttcatgatactatattagacattaaactgtttgatataattagcaaaagtagttgaagctatttttcaaatattcaatttgtatgttattattacaagattttggaaaatacgaaggcgtcactcataatcctaccatgctgtataaagtatatttcctttgtgtttattaacactgagttcttgctcaaaaatctatggaatatgtaccaaaatatcctatttctttccatttttgaaaatgtggtacaccagttatttataaatatactacagccaactcccatcattttaaagcaaatatggtaaattcacaattctgtcattagtatcattccccccttgcattgcatctataacaattgtgggtccttttatgtttttattgttttcacaccaagatcttattgaacagggaatagagattgtttcaaccatttatggctagtaagcatctcaaattctacatgtatttagttattctgctttatcctgttttccaaaagaacaggttgtttcttaaattcacaaaaagtttagtcttgatagaaaaatgaacctatagcatttttattttgtattgaatctcaaaatccaaatgagagatttgaatattaggaccttgacttgactcacctctgcttaattttgacagttgtcttaaagtgaatttagtgttaaatgaaattttctggactgataactcaagacctgaagggaacaattctagtggtgagaaagtaattttctggcctaattacacctttggcctcactacaaagtctgtcaacaaaaatgccaggtttgatcatgattttttttgacatgtattcaccaatctacttcacactggagattttttttacaatagcattgggtatttgcaacctaactaagattttacatctgggaataaaacctcagtgtactgtttccaacaggtgattcacttaaatctgttttaaatgaaaaattatgtggatattaatgaactttacatattgaactctggaaatctacatggccatattatttgagacagccgtgtgaattatatcaactatcgtcaaatacctggtgaattggttttttaaaacaattgaaaaactggagtctccagaatctctatttcttatttatattcactctgaaactagcagggttagataagctaatagttgggcatctataaaactgggctctttcttaaggagatttgggtccctgtaaggttgattaaccttaaccactaaatatttgtggctagtaagcaaatgttggcaattcctttaaatttctgagcgtgagtttctctacatttcagtgctccagtagcacattgtttagctgtcaacccttgaatcttttctccaataatgccttgaccagaaagcatgtatctgttgcatgtttttcacctgaacctaggctctactcctcaaatttgaattgtctgtcttttcaatctagctttttgctttctcctctctttgcatttttttctcttatgttttatttaaaacatttaaaatgacaaagttgtttatgaagcctgtgtttagcagaggctaagttctgatgaaagaatcaaagtaacaaagataactgattgatgttattgaattattgtctctgttgttctgctgtttaactcctccatctacttttgatacattttattctcaattggagaagttacacacacacacacacaatcatatacacaattacacacaccctttatttccaaataagtaaaatattcatagtcattaaatagagtatcttcttgttgcagaaaatctgaagtgaatattagatatcatacaatatattcataactatttcaaaatttatttgtgaaatgcgcactttagaaatgttcctttcataaatattcaacaaatatttatgatgagttgcaaagatgaatgacattgccactcagtaatctataattgaaggtacaaagtagcaataccaagagagttacataacagcactataaattttttcaaagaggaagagaaaactaggggttaaaggcataattattctcattatagtggaaagtgccatttttatattggcttaaaaagagtatgattcaactcaaaacttcatttgtacaacacaaatatgaaaattaaatccgatagcaatattttttgtggaaaaatatatgagtttcatggtattacaaagcatataatgtggctgtttgaagattcaaggcaatcactgactgattaatgaatatgtaatttttagatcattagagtattagtaattgttaccatctattgggatttatcatatttcagttactaagtccttttacatatattagctcatttaatactgataaaatatctgtgggtagttattaccatttccattttacagatgagtaaattttggcactgatttttcttgctcaagactgttaacataactgccaagcctgtttcctgaatcacaaggtgacagtcttgtatgtttatcggcagcattgggatcatttatggttgttatattttgatcgtgatttttaaaaaagcatgtattcatcagtttatttcattctgaacccttttaacaatagtatttgatgttttcaacctaagcaagatttttacatctgggaacaaaacctctgtgtaccgttgccaacatggtgattcactgaagtctattttaaatttgatgctgtgtggctgctgacaaactctacatattgctttgttttggcagcagccttgtttgcttagacgatatcaacagtattgtgtccatttgtggttgttacgtcttgagaggtcatgatagaaaacattgcccaaattgggtaatcacaactggaagttattacattaacattggttgaaggaaatgagaatatttagagaagaatgggggctctgagtagggacattatcactgtctttggatatagttacggaggttacagattaattctccattgttccagaaggcaggactgaacgagtgactgtcactcatgggagaaaaaatggttcaaatatgagcccactgagaaactgtgtggaccatattgcatggaaatctcattagaaatgccttgagtactctctcccaggtgtgttgtacagggatgttttacatttaggataatgttatagttattattaattctaagattcaatctgcctatgaaatagaaataaacttaatttcaagggatctttttttcttgaagattttcatttgatattttattatgggaacatataatctaggaaatgtatcctccttctcaggattatatggaaacaatataatttttgagttaagtgtttgaaatataaaatacacacatttgattatatcatatttagatgtattaatctgtctaatcatatacatagtcatctatattgatagtcttccattaattattccattgtatagaaaatgttgtaatatcccagaacatagtaaatcatgttctttcttttttcctgctactttaatttgtcctttgacagatttaagtgacaaaaaataaaatccttatattttacctaataaaaattaaattgaaaatatctcaggaaattaattttactatgtgctaagatattttctagtgattaagttcatatttactcaagataaaacaatgtaacaaaattaaaattgttcttatgagtcatatatatatatgtatgtgtctgtgtgtgtatgtgtgtttaagcagctagtattactgttattctttgtaataaacaacatggaaaatcttataaagatatttgaaaacttctttttgcttttcccctgtctaggacatgagattgttctataacaatctttttctataacaatgttatagaacaatctcatgtccttttttttattattttcatcactttatccataatactctctaaagagtgttacgtctatcactagatattggacatttgatgtcattttaaacttgtcagtgactaaaaagaaactcattatttcttctataacagctagactgatttctctctttttattagtggtaatttctgttttaaataattacacagactaaagaactgaaggagttaactataattcctaacataatctaacataacaaaaggcagcttacacattacataaaaatattttagagatttatttaaaatcctaacatattttaagaatccatatactatatcatctcccaacaactttctgtggtacatgtagtaccatgagaaattaagactagggtttgctgctgaaaatcagccagataatggcagagaatttgaattcataactccatgcctctgctcgtcccaatatatggggctatggttgtctcataaccccaatacatttgcttactttattcttggtgaaaatagaatgattttgtgttgtattataaccctaaagttattaccaaacatattttaaaattgttaaattgaaaatgggtatacatattttatatgccagatctgaaatattgacatgctgtatgttcaaaacccttgtatataattatgacccttctaacattaagcaggtgactggatttaatataagtcaggcataaagtgccctgcatgtagcaacatagtgaatcaagcaaattatcaaacaggaaagctcattttgtgctcagggcaatttcggctgccagcacttatacatcaaaatttcactcaatgtacaattgattttattttattttgtttatttttaattccctacagcaggctatgttagttttgtacaatgctgtttgcatcattaggttcctaagaaattatagttgtttcagtcatggttgaccaaaatattattctcttcttatagaccatggatattggttcttgaatgggtaccactgaattgaaattgtataatgccagtgactcaaatacacacaacacataacacacagaaaaagcattagtgttgttagaaacatgaacatctaaaaactaatgctgtaaaatcagacagccaatgtccattaaagatattttccacttcaagggaagaggttcaaattaaagtttgaaagtccagtcttaaagcaggaataaattcctgtgtaagatgatacatgtcttcttttcacagttgctttttatgttgccttaaaacatgtcaaaaaaaaagaaaatccccaacagaggagcctaaaaggaatgtcagctctgtggttatgtaaattgaattgagtgctttacagcaggtttaagatttttataactcagaagttgttaacagccagctggtttgtatctgttttttatggttattcttgtcatatgcagcctccacaattcttaattatattttatggtatgtgttttcctcctcctgaatcccttagccactctttgctttacaagatattttccactgggaagggaacaagcacagagatgggacttcatcattggaaatacagtggtataattacttaccactaacagctctacagtgtgaaattcaagtaactttccattgcaaattcataaccttctattagagcattgaaattgctttaatgtaacaatatctgcttgtaaatttgtgagccaccccccagtaagagtcaaaaacatgattatgacactctttgtattccattttttagaagaagtgatatacagaaacttccttccttcctaccttgtttcctctcagtattcattacgtaaattaatttctgtctcatagttaagttctaaatgtgtactttgttttctatttttgattatacaaagaggtagtgacttctagtatggttctaaaaatcttatgttctggttaaaaggcatttcttttagcctcagaggtgtgaataaacttttctgagatttttaacaccctaacttaaaaattgggctaatattcagatttttctcctaagaaaaacagagtgaagaaatatgttctgaatttgaaaaaatgtttttaaaaatcaaaatgtgtgcaattatcaaggaagtatatgtgtgcttatttcacagggacatttttagagacttcaaatctttgaaactatgtacacatttttggtattagttctttgcaaaataaaaatattccagcaagatctcttcctcaaatcacagtttctagtttttggaatacaatgttgtaggttttagacttttaaataatcacattgaaatatattatagctaatatttcctacaaggtgagaatatttaggccaagtgaaggagattaaaataagtaatatgttttggtatacattacatggatatagtgctttttttattacttttttttgagatggagtttcgctcttattgcccaggctggagggcagtggcacgatctcagcttactgcaacctcagcctcccgggttcaagagattttcttgcctcagcctgccaagtacctgggatcacaggctcccacgactatgccagctaatcttttgtatttttagtagagatggggtttcaccatgttggccaggctagtctcaaactcctgaacataggtgatccacccgcctcagcttcccaaagtgctgggattacaggcatgagccacagagcctggccatcaattttgagtataagaaatatataatgcataatgttcaatgaaacaataaatatacatccctaagaatgaatttatataattcagttttattaccttgataggggaaatcaccataattattgtgatatgatattttcaaacattatgccttttagtcacatatcatagatatactgtgtttaagactacagagttatggttcagaaagatttattttgagtcactgaacactttcattttagtgttaaggtatttaatagaagttagtttttcttcttttaaaactggatatcaaagtacattttttattttgtgttgaattatttaagttcgtgagtatacttttgaaagtaaattcagggacacggtggctcacacccgtaatcccagcactccgggaggcaaaggtggaaggattgcttgagctgagttcaagacaagcccgggcaacatagtgagaccccatctctgaaaaaataaaaaataaaaaaatagaattactcagacataaaaaagagaaagtaaattctactcatgaggcatgtttctatgttaatcattttgagatttggtacattcacaacattttgtactgtgtatgtatatgtgggtctccactagaaagtcaaatgagcaccagacgaaattgtgaaaaagaataaaaagaaacctttttttttttttttttatctgagacagggtctcaatctgtcacccaggctggagtaagaataaaagaataaaaataaactttttttcttcttgagacagggtctcagtctgtcacccagactggagtgcagtggtgtgatcactggctcagtgtggcctcaacctcctgaccttttgggctctagcaatcctcccatctcagcctccctagtagttggaactataggcatatgccaccatgcccagctaatttttaatttttttaatagagataaggtcacactgtgtttaaatgctggaattacagaaatgagccactatacccggcctaggaagcatttttgaatgtcaaccatgtacaatgcaccatactaggagacattttatatactgtaatttattttccgcaagatcctatacagtgcatgcaattagctccattaataaaatgaggactctaagtctcaggttagttagttgacttgatcaataatttataactaagaagcagtggagacagttgtttgatatgtatatgcacacacacacatgtttatgtatatatatgtgtgtgtgtgtatatatatatacacatacctgtacacatatatatgttcatatatatgtgcatatttatatgcgcatatatatatatatatatatatatatatatatatgaaagaagaacagtcaatctgtactcaaggtaaaggagatgagttttcaagtcagtatctgtctatctatatctgtctatcaatctatctgtctatctatctgtctatctatctatacttttcaagtcagaatatatatattctgacttgaaaactcatcttctttcccatggtacagattgactattcaaaaatgtttggagatataacagtgttttgattttgttagagaaagctaatttgtcagcattatagagataggatgacagcctatgcaaaggaactaacataatttaacaaaaatatttaggaagaagaaataaagtagtaaaaatgttggaaagaaaagacaacaagcatggttagagaaggatcaacaaaacgtgctccaattttgggtaagataaatcaaacagagaaaatttagcctagacttagactggtggccataaaatgcagtttagttagctgttttcacagggttaaggagctatatactgacaaatagaagtttgaccagatgccctattcagtaggcagaagaaaaatgttaggccaatgattaaattaaaataaataaataaatagaagctgagagttacttgatctgatactgacagtttggactgaatagaagtataatttgggcatgtggtgaggaagaatgcagaatgaacagggaatgcccaagtaatgacacaggcaagcaaaatcacacttaaggctcatctgaagtagtttaccaatgtaaaacaatggctaaatatcttgtgggactggactgaattaaataaggaaaaaaaagacgcaagaccagtgtgcttctaaataaagcccaatacccaaaatcccaaataacttactttaaaaaacttgctaatgataacctttgaagtatgtcacgcaagtttcaagctcattaaattattggccaattaaaaattactttctactttcttttttatatgcttcataaaaaatgtgactgttccagaatttccctttaataactttttcttctttggcagattaatttagaccatgttgacattttgtaaataaagttttcttgggaatatgaacaaaattaaaacaccaacaaattaaagcaaatgaaaaagaaagatgggaaaaagtgaaatagtattctgatttaggactgcagtatttagaacactgaaggatttaagtgtcatttctaagatttttaattttaatttttattttgtgtgctttcattaagaaagaggcagccaggctcagtggctcacgtctgtaatcccagcacttagggaggcagaggtgggcagatcacctgaggtcgggagttcgagaccagcctgaccaacatggagaaaccctgtctctcctgaaaaatacaaaattagccgggcatggtggcgggcacctgtaatcccagctactcgggaggctgaggcaggagaatcgcttgaacctgggaggcagaggttgcggtgagccgagatccctacattgcactcaagcctagacaaaaagagtaaaactctgtttcaaaaaaaaaaaaaaattaaaaaaaaaaagagacatcaccaatgtcagcctgctatgctttcatgaaggttttgctaagtgatgtcttgatttctgtattcaagtgattgggagaaaatcttacacacagagtaattaacagtaaaaataatgtaataacatggcatagcattatgatatgtgtatcaaatgagtggggcagtcattgagggctgaaaagttctgaagttctaatcatcacagctgtagccatcagggaaggtttcttgcagaaagttgaagaaacaagttgctttcaatgatttcaaatgagcaatctggaaattttctagttttacatcttcagcttttctctgaagttgactaaactatgttagaggttacacatcacaaaaaagttaatgctgccatgtagattagaatcataagtctgtacaacatgcaaagtaagagatgttctttaatgaaagataaacctccaacttttcctttaagcctgcctttcttcattccccacctatctctgtaccaaataaacattttatcatttttttattgttagaattatttttgtttatcaaagccatctgtcatataatcactgtatatgtatttgagatcatttggtgacataatggccaaaatattggcattttaggctttgaagttgagttgaatgtaacgtttgtgaactgtaatgcttatgaaaactcaagtgccaacacatttccatgtactcgcatattacacttggacatgtgggtcagtttttcagtttattgaggcccacttatagtacagtagttaagagtgtaaattttggagttagacacatctggtttgaactgactgccccatttattagttgtattttattttattttattttattttattttattttattttattttattttattttattttactttattttattttattttattttattttattttattttattttattttattttattttattttgagacagagtctcactctgtcgcccaggctggagtgtggtggtgcagtctcggctcactgcaacctccatctcctgggttcaagcgattctcctgcctcagcctcccgagttgctgggattacaggtgtgctccgccacacccggcttatttttgtatttttagtaaagaccaggtttcaccgtgttagccaggctggtctcaaactcctaactcaggtgatcttcccgcctcagcctcccaaagtgctggaattataagcatgagctactatgcccggcctattagtcatctaattttagatggttacctatccctttgcacatcattctcctcatttaaaatagtgtatgcttgtgtttatacacacacccatacatactatagatgtagtacaattattaacagaacgctgactatagttttgagcacacagtgcaaatataaatagtggttctattctttctttttttttctgatgagaacatttaagatctactctgtagaaaatgtcaaatatacgtcacagtattgctaagtatagttacagtgattcttttcatattttctggaaagttactgtaatcagttctggcattaaaaaataaagaaaatagaatttagaataaatgatagtgaatacttcagaaatatgcttacttttcattcagtaatctcttgttatctataggtagataaataccaagtttatatataaagggagagattcaaacctaggctttgttttgcatccaaaatattctaatatttttggtacatcaggaaggaaaagcactgtaaggaaaagctttaagaagggaatgctctcctagcaggtgcgataaccacaggtgtcaggtgtaacaattacagtaggtaaaagccttagagacatgcgtagggcagcgtctgcctttgctcttagtctgaaaattcaaagagccttctgagataagaggaaatgacagatcagggagcagcactggagctgaattgactgacggtcatacttcactcaggcttagattgttttgttgttcttttggtagagtttacttttagttctttggtaaatgtgttgaccttagaaccagctgatgtttgttggcactggaatgagtgtttcttcttgtgagtaaatttggaagagtgtgtttcttttgagcatggatttaggggcggggtttattgtgctgctttctccagaagatttgggaaatggggatgaattttgtcatcaaataatagaaattaagttgaactgcattaaatgatcactttgtaggtcaaaattagtcaaatatcagcaatttcatacagtttaaccaaatgtgtgttttagtttaagcttccgaatctggacttgcaatatgtagaaagatgaggtctcatttatctcgagttgggaggactcaaatttggataaattgttggccctttaaatgatcttctttaattatgttctgtactggtcatcgcggtccacttttctacattttctagatttcatttcttgtagtgttgctatttatttattcaaaaagttaacgtttatgctatggagggtacaagagaacaaaaagaaaacttaatgagttatggcctctaccttcaaggagctcatagtataattggacaagctggtaaacacatgataacaatataattcagtatagctatagttgagatatctgcaaaatttagaaggtgaggcggaggaagacataatcaactctgcttcggtgaattaataataactgattatcacttcctaagaggtgataatttgtgatggtgtttaaactatgcatagcagggaggggaacgattcttggcaaagagaacagtgaaggaatcagatgctgagttgaaggatagttcttcggagttttaaatagaatagaaagtggaatgagtgcagtgactggtcagtgatatatgtggaaaggtaggtgagggacaggttatgaaagcctaagcattgctatagataaggtgtttgaatcttgagttctaggcaatgggtaatgccaaaaatgtgcaagcagaggagtggaatgacttaattttgtgaagcagaaaaagaaagacaatctgccatggggagagggaagataaagggacagtaacgatttgttagagtgctgaaatctatactagaatttagccttgttttctaatcatttagatgatgaggaggcagcctcactgttccattcgtgtggcttggtgcattgctagttctaaagaccgatcagtgatctcttatgtaatctttataagcatttgcatttattaggtacctatgtcatatgaaacaaataggaatacgatctagcatgacaaatgccaattaagtagttcctcaggaattcagagaaacactcatgaagggttcattaatttactaaaagtctagtatttagcaagaatatctctaggagctggaataaagtattgagtaagacatgctgtctgtgtcacaaacatacattatagatataatctttctgaacacatgaatatctgtatatatgtgtatgtgtgtgagatactagtacaaatacagcttgcagtttcctaaaatttattccaaatagtttcataatatattcagaagcttatgatgcatacatttcatgtatatgcacacatatatatacacacatatacatatacatatacatatacatatacatatacatatacatatacagatacagatacagatacagatacatatacatgcattcttatctcactcccagagtgccatggcactatcacagctcactgcagccttgacttcctggcctcaagtgattctcccacctcagtatcccaagtagctgggactacaggcgtgtgccaccacaccaggctaatttttgtgtttttagtaaagacaggattttgccatgttgtccagactgatcttgaacccccagagttagaacccactcataaactttttattttgttttctttttctcttttcttttctttctttctttcttttttttttttgtgagacagggtctcactctgttgcccaggctggagtgcagtggtgcaaaacacagctcactgcaaccttgatccccagggctcaagcaatccactgacctcaggctcccaaagtgctgggattacaggcaggagccaccgtgccctgccctcatgcacttttgaaagacctatgacaatagttccatgatgatatcaacaaatatttgagcagccatgttttcactatattttgcatttttcttctgtgctatagcaattgtatgtcttttagtacaatgattaccaaaactgtattttgctcttagaataaatgctaaatagcttatataacagtaagttcaaatgacctttgcaaatttttactaacaataaaaagtaataagatgcttaagtatttgatggcaaattttacttcatgcataatgaattacttttcataactgaatgtcaagactggttttgtttgtatttatcttacaagtggagcttcaaacttgaattaaaataatttgtcataaaaattattaacatcaagtaattcttacaaatttattatgatgaagatgcactgtcaattttagtgattatgtgaataaatgtatgtgttgaaagatcatatgtagttgtcaacttttatccgaatgccttgatgataattagaattcgggaaaatagagtttagagtctcttagaattctacaaatccctgattttctgttttaaaagttgttttggtcttctattacctcacagagagagaaagtgtttcttgtatagaactgcttaaatgggtctatttaccacatactctgaaaatctaaatatcttattatctattacaataatattatttaatttgaatcacagtttgaagttaaaaattaaatattttaacttttattcagtaaattatatttatggatatgtaattgaatgttgacattgagagtaaacagtgtaaggaaatggaaaacaaattatatttttctgagaatagaaatacttcttgctgctgtaatataccaagtactgcttatgtactggattacttgactattagaaattgtctgtgtaacaaaactagccattgaccaagaaaccaatgtaatggtagaggaaacattgctgatgtgctcttgatatgtattgattgatttgttcttagagaatatgggggaaatacacatgatattattagttatttgaatctccttttatctattctccactattcttggctatttcaatgtgaacaaacagtaaatatattataaggagtgagcatatttaggggctccaatatgcgtttaaagagactttgtgtgtatcatggggtagcttttaataaaggtcaaagtgcttggccttccaggggaaagacgaggattctagcttgcttctggcctctgctcataatgtgagtctgagattaaagaatttgaattccaagatagcaccaattcttatgtctgcactggataatttagtgactatatattcaaagtctaaacttagaatttttgtgagatccgtgttgctcgtatccatttaactggatctctttttcagtgtgattttaccatgatatatttctagtaataaaatgtccttaaagtcaagatgtgtatagtgaaaataggtaatgtaatgacaatgtggatctttttgtgatttttgcaatatttgtttattttcctttccattacaacatgaattaaaatttagttttcatcatcttaaaattagtttctatatggtgtttgttatggaaattagtgtcttttgatgtcaaaggacactaacaatagcctacatatatggattgcttatgttctaccttacacagttgaagttcattatgtgtactccctcatttaatttttatatccgctacaacatgttgttgttgtcagccccatttacagggcagttaagtgacttttctaaggtcccttagtaagctgtagatccaaattttacacaattttaaaatgtggtacagagttcatccattcatgtacattcatgtctcccttaatgacgaagatacattctgagaaatgtgtttttaggtgatttcatcttgtgtgtgcatcgttgagcgtacttacacaaacctaggtggtatagcttactacatacctaggctatacgtatggcttattgcttctaggttacaaacctatacagcacattactgaactagtgtgaggaaataataatacaatggtatttgtgtaataaggatttttcagcaatattacaatcttatgggaccactgttgtatatgtggtctgttgttgataggaacatcattatgcagtgcatgactatacttacaaaacaaaatttctggcaaggaacatatttacctagcaagttccattattgatcctgagaaataaagttgaaggggtggatttatgttattattgccatggccttgaccctaccatctgtcctgaacaagtagtggcatctccttcagtagtgaggcttctaacgcataaatggcaggaaaggggtggctatggtgagattataggaaggaaactgtcatcattgaacacctctataccataccttttatgcgtcctatggcatctaatgttctcatcaattctatgagacctaagcaatgtgatcctgatttttaatgctgcaaaatagttaactgtggtaaaaacagttgagatcttacaaacagaagccatctatctaacgactgagaggggattggaacacagctcttagtcttcaaaacccatattctttgtcctataccatatgcctgctattgctcacaatttttaaacttttaattaattatttttttcctgttaatggtatcaaagatggacattaagaggagaaaatggcactaacttggccataaacacatgtactcttaaagctattgttgtctccctccctttcaccctagtcccctctttctctcttctcgtcgcctctcttgagctctgcagttgctgtatcatgtttttctaaactggtctgcaccattaagaatgaagaacatgaggttaatgattctagtactgtatcaaagcattgagaaaatgttaccaccaattttaaccaccccactgttactggaaaagtttgagtgtctatttgatatagctcaaagatgaccagttttttggtgtccacattttattgtcatatatttgattgtatagtaattaaatgaaggatgccatctttgtgttctgtagacatatcatcttattgtttatatctctccagctagagacaagaaaggaaactcaaagcaattgggtgctatttcatgtttctgttcctggtaactctaaatataaaaatcaaattcactgtgtaattttatgaaacttttctgtacaaggaccaagactttcattatgagaataaagtagtgtcttgaaaacaacaatgatattatcctctgaaactaggagttgcaggttaactgttgagcatgcttgggaaagattacaaatattggaatattggaaatagcaaagtaagtgggcttctttttgaagttggtagctattttctttaatattctccaaggagcttttctcacaggcttttttagttgctccacaataacaacccatcaccccttcttttctaacagaatcctaacttgattcaggtattcccattgtttctccagtcatgcacttaggaggtctcagccccatgttctatcccagttgtgagtcatggtggccctgttctctttgcctatgattggttgggcatgatcagatgatacagtttgaccagttagagccttttagatgtcccgtgggaacgatttcttcaaggactaaaaagaaacatatagcataatcagctaattcttttttagttggattcctggaattgctgtagctaactttttaatactttttaatatgagggttatctaccaacagatagcagaaaggaaatatggaaaaaaaattgggttctagacatcattgatttcctgatttatctaactgtaattgtgctcgtgaaaactctttgtacaaggactggtatgttttcaaactaatgtctttattatttaatttgaggatttttcttacttgctgtctagttcccttccagcttcacagctcatgctttacaaggtaatgataaaatatgccaagacttcacatttgtggcagtgttcagaatctcagttgtcatccaagtatcatttttattaacagttataaagtgatttgatagtgtcaaatgacagatgctaagtaaaaatcattttcgttatttaaatattataagtctgttgtctaaatgtatgatcacagtttgcctatagcctcaggtatacataatgctacccatgcctttctcttttctctattcatccatttttgcttagcaatttttacaagacacctgagtattggtaaatagtaatggcacacattctttgccttttgaaattcagcagaatccacaattaaatggatattttattgcaattgtctttcagagtttaatcagagtgtatttattgctgcaaatgcagacttataaataattccacactcactaaaatgctcaaatatggcattcttatcattatcacaaattgaggtaccttgaataaaacaaaataagtacggaggattttctattttccactaaatggtatataagaattactttttagatatatttagtgtgtttttgaacaaattgaagtttttcatgtgattaaacttgatcaaatagatggatcaactttctctgtaacaatgagtaaacttgtagatagtgttcacatttttatgtccaaatgtagaaagttgggctaatggatcacttctgaaattcttcatgtttttatgacatgtattagactctgcaattatcaacactactttttccttattagtaacttttgagtggctgaagaaaacaatttgctttgactgtatcactgtttaaaagaaaaacgattacagaagggttgttttttttttcttttttttttttgagacggagttttgctctggttgcccaggctggagtgcaatggcgcagtctcggctcactgcaagctctgcctcccgggttcaagtgattctcctgcctcagcctcccgagtagctgggattacaggcacccgccaccatgcctggctaatttttgtatttttactagagatgggacttttaccatgttggccaggctggtcttgaactcctgaccttgtgatctgccttccttggcctcccaaagtgctgggattacaggcatgagccaccgcacctggccgattgcagaagttttatatctcttttggtcctgttaaacaggaaagagtatattccagtctcaaaggcaatttcttgaaggacttttcaagacagagttcagtatctcagtttgtttccaaacttgaaatttctcaagtttcagaaacacagacttattaggccaccaggctagtgcagcaatgtttagatatttcaatcaaagaactgtgttctattaccctaggatctatgtcaagctgtggattaggttaaaaaaccaacaaaagctcctggtggttgaaagattctaagtatttgctacattactgcattgcaggcatgagcacgttctttcagcgttttagtttcacaatgttacaattaattaattgtgtctgtctagcaaaaacactagtcggagttactgtctgcacttttaataaatcctttgaattcccttgatctttccttattcttatcctccctgtgtactgtagcacaactttcccaagcccataaaaatctgattaatggaacaaagaattagacttgagatacctgcttttgttactctcccatgcttctctgaccttgagatcaccttctaaatgtacctcaggctttttctcttaaagaagagtaaatgagatgattgaaattataaaccatgaccactcttgctattactaaatcgtttacgcacatacatgcaacttgtcattcacttatgtacattctaaactacagtgtttcgttctagaaagtagttgatatttctgcatttttcttcacctttttcttcttaagctccccagttatatgcctatgtcaaaattatgcagtaaataaagaggggggagaatcatgtttatcaattgctcttccgacaatgcttcccctcctaaacttggagtagcactttatggtttcttgcgtaaaatcaaacctgctcgttgattctaaaaccctctactaatttaatgaaaaccaattattccaacttgctttggattctggtatctaggcttaaccacatttttcgaaacaccgtgtttgtatccttaatattctatgaataaaacttgattttttttttccattcatgattcaggttagatggtctcttctcagaagtctcctttactattcttggcaaatacagaaaagaaacagagctgctgctataaacctgctccatccttgaccccagaagaactcattgccttccagctgtgcagagtgcacttcttagtagggagcctggtcttgctttcacctggtgctgctggtgtaagcagccatcatgttcagattcaaaggtggccaagatagcatcctggggacatgtccctggaatgaagtagagccccagttctgtccaaatgctgctaggtggaatagggttgggtgccctgctgagagcattgtgatttgtggatagaacctggcagagagggccccgttagtacagagccagctctctttccccttttcttgcggaagatctgaggtatgatgcaaaacattgcttcttccttgtctcacagtttatatgaactctgttggtgacaggaggatctaccttatttatactgtggcgtggaagtggaattgaggctgtgacaactttcatcctcaacacagtgccagctgaaaaagtggatgtagttgagaagaactcagttcgtttacttctctagaaaatactgatataaaaactacacatagaccattcatttttggttgagaatattagctaagaagataaaagtgttcctttcaaaaattttaattgtatatcaattaattattttgctactagcatttctgatgacagaggaaggatttctgcgttaaaacaggtcagataatacatagatactgttttatttacaatgcatttaattaatatcaaaactacagttgactttgtgcaataatgacaagattataaggcattatgttgtgctaagcaggagactacaatttaagagttagtcttttcgggaagaaaacatgtccccctcctcccttttgtagttttacgttgagctagagagattgttttctaagattcaacacctaaagaaagcatttttttaatattgttcaaagctgacctctgcttttagaaaagtttatctgcactttttcatctgtttagaaacatatatttttggttaagagatcgaagacaatctctctttgtcttttttttttcttctttccctgagctaggaaggttgagataaaaaagaatgactgctttaaaagtcacacatggctgtaatttaatatttttttcctctcattgtccgtaacagttgaaagaaaccttcaatgaaagtttattaactaggccaatgcctgaggcaataaaggttcatttattaccagtttcttggctgtttttcttcttctatttttcggttaaactcatagcgtaagataatacttcacaaaattaaacctttgaccttctgtagagttaagtctcctttgattagataaagtaacaatttatggtccagcatgaggttgcacatgaaatgaataatgcaacagactccgtgtggactgagaatctattgcttttgaaaagatgaatgctgtttaaaggggagaaagtccgcttaagtgtgttgtctttattcagtatgcactttagcaatatttcaaaaggctttacctccaagataaagttatgtttgaattttctaattctcataagaaagatgtatggtaagagtattgcaaaaagcttttgaaactctttgtaggactgtcatacatgtcattatgccacatattccaggtattacaaatggctgaattatgaaatctaataaatgcatgagaaaaatgaccattgattttacaaatggagttccaaaggatgggacaattagaatattgtaatttctaatcacattatgtgccactgtgaacattgcataaatcaaaatgatatttaataacttcatcttaagaagaaaagtaacaataataaaatataataatattaaactgaatttgtaatttttttttttgagatggagtctcactctgtctcccaggctggagtgcagtggcgcgatctctgctcactgcaacctctgcctcccaggttcatgccattctcctttctcagcctcccgagtagctgggattacaggcacgtgccactatgtctggctaatttttgtatatttttttcagtagagatgggtttcactgtgttggccaggctggtctcgaactcctgacctcaagtgatctgctcgcctcggcctcccaaagcgctgggattacagccatgagccactgcgcccggcctgagttagtaatttttaaaccaatccatgggagttcagtctttggttattgtgatgtattaatgtttgtagataacagcagtgttttcaattttgttttgtttaagtcaccttataaatttgaactgtcataactcattgacaaaaaagagtgactagatgtgaaatgttcagatatttctatttttctatgttcttttgaacattttttggaaaagttaaaaagaatctcaaatccatccatgaaaacattgtattggaattacctaattgctacagaagagatatacgtacttgtagaatcagaattgatgtttacttgtatcttcagccagtggaagtagagagatgtatacatagcataggtcggtgtttctcacgaagcttttgtgattagctggttatttaaattactaattgacatgcagaagttgaatgcttgagagaagtgtcttagttttagtttggttctttttcaattagcttaaattatttaaggtgaataaatctactgcagtgatttagtttcttttaatagaatctcatggtacggtataaattaggtcaagagaagtcattggatcagtataactacagacattgcgtctaaaatgaagagatgttaggaaaattgaagatttgctatgacttacaaatgttttgaaacaaagtaaaagttcctgtcagaatacacaaaaggttcacatttcttggcatgttagtaactaaacatttctttctgttggaataatttttttgcagcaaaaagagaagtgaataatataatactgcacattggtaattcttcctgatatataattgctctgttcctaggtgagatgggttgaatataataatcaaaccttataaaagaaataaattcaaacctaaacaccatttattttttgaacagtaaggtgtgaagtctccttataatcagactaagtaatttgtctaagtcacactcaaagaattaagtaacttgaccatgattatgaaattgtgccaagataagggcttcattccctttaacattccaccatgtaggagatgccaaccatttgagactatggaccacaactcatatttcatttgaatcttccttatcacatggcactatgtgtttttctagattaactaggattgtttttttccataatccaactttaaaactgcaaacacaaacctacttttcaaagcactacaactggcctctcactattcacgttttctttgtaaccagatgaggaaaacacttaccttgtaggttgatgatggagcttaaatgagatgttgttataaatgctagacctaatgacaaagaagtaaaaaatataatgcctcaaccactggtttctctgttcctattgttaaccagtgactctgcatgtatattgttcctagcccactcagactttgacctccacttagaaagaatactgtgtgtctgtattctttattctatgtgtgtgtatatatatgtatgtgtacatatattcatacatatgtatgtatatatgaataaatttcttgcatgagtcttttccttgaaaaacatttatttactgtatcagaagacttttgtggccacgtattttccagctatttttatttaattagatggctcatcccaaacaagacttacatgtaaaaatagccacctcttttgtttttttttgtcattttctgtcctcaacaataaactacacatgcacagaccccatgtggtacttggaatctggaaaaagaaaaaaacaactgagacattgaggtagaaatggatttagacaaggatttgcatgatattgagaaaagtagaacatttgaggagattatacttagactgaaatgccagtgaggttattcttttgcaggaaattacgattatcgtatcttttcctcttttcacttattatattgcctgaactatcaccaatacattaacaagaagcctcttaacaaaacaaaaacatcgtttagagtatcacacactttcaatcactctcatgctacttagagctacctgcgtggagtcaattcactgagtaattttggctgatgggttctgtgagtagtaagaagtattgggccttagaccaacatgaagatatctaatgcctagtttattaaataattgaaaaagatataatgagaggggtgcttaaaagaaaattagagtcaaggcatgtcagttcaatttgtttctggttggaatttgttttatattcaagatatgcagagaagaataatttatttactcttctttttatttcttcctcattgtgccctatgtaatacataggattcaggcacaaattatattgtatttcaccaatacagtataggttaaaagttttgtgcataaagttcaatggtcattgtttctgtggcagatacactctaaattctataaaactgaaacacaaacatttagatcagatttctaagtggagtcaatttatattggtatatttgtgacatacctgagtgtctataacttcgactttctatacaatccataagctactagagcaaagtgggggtcatctgtttcaaagactccatagtttactgtcttctgtacttttctttttatatttactcatagaatccgtgtggtcagtgctgaactgggagtaaggcgaattgggattactctgtgattatttaatggtgtgactttacagaaatgattaacctcattgcccctaaatttaatcatcagtaaaataaaagggttacattaggtaaagtctttctaatccccaagttttataagtttaagaccccaagaggttgtttagaaatatttttctaaaggtagtaatgttaaaggtggagtaaaagttacatatttaagacctcatagtgccaagttcaactttttataaattaggtaacagttgattttaaaccaaattatagtaatttaaaagtttttattgattacgtttcagcctgattttgggttagtgatcagaaggtgagcttttcaaaagctttcatagaagttcctcagtgattgatatggccagatgacttccctatggtgttccttctttctgatttcacttctataacctcttcagtctgagaaattgagattttaagctatccagaaaaagaatgctaaatctgatgtctatttgatttataagtcattattcatattataacaacatctttcttactgtatatatctccaaattagtggggtttttttgttgttgttagtacaaacatttaaaaaatctaattcaatcagttgaaagactcaaaactggtatagggagtgtttccattaatggcctcaaggatcaatttttctttttctctgcagaatacaaatgtgtttcaaaggccaagaaaagtcagtctaatggacattaagagaaaagttcacactcaaaatcttcagtctaaccagatttacaattaagttttttgttctatctgcttatcattctggttatttaatcattcaagagtgaagacatgcatgtttcaatcacaattttaatttatttagaaagcattgagaaataaaataactgaaagttagtgtcagtttctgacagctggtatttaaataaggataggaggaaaacagggtgaaaaaaggtactggtgttttcaaattgttatattgagccaagagttcttctaagacttggagtgatttcaattgagttgtaattcaaactcatgtggagcttacaatgcaccttcaacagagttttgcaaagagtctataggaactgtcaggagcagaaagattacttcacagtaatgactgttgaattgaactatgctttttgatgttttactttctgaattgaattgttggacaagattaattgcacacggtgagagttttaaatgaatgactatgtaaggcattaagtttctctgtatgccacttggggaaaaatagctgaaaggtttaaatgaataagtgtatttaatgcacaaaatgcctgagctaattttaaaattcttttgctaacatccttattgaaaatagaaacccactttattcatctgtcttggttatattgctctggttgaagtaatttaatattcctgctttccactaatcttctagttcaacagaagtaaacaataggtttcataaattaaaaatacactcttctgaacatgcttataagattaaaaaaacaaggctgtaaacatttatgactgaaacaaactagattgttcaaatactgccatgatgtatcatgtatatgaatatggcactgatatcagttagaatgcaaacaaggttttaaatgatgtgccccttcatttcagctggagaatccgcttcacaccatctgcctatcagatggttaggaaccaggactgcgtattaatgccacatgttcgattttcctccttcttgtaatggttagattcatattgctaatagctgtgcatgagcactgtcgacgaaatttctgtgacggtggagtgatgagatatttataagccgcctgtctctctgaataatcagtaggaagaatgccagacataaataacttatcaattccaaaataataactaccattggctataatctactgcatgtttaaaatggttttgtttaaatgtaagcaaactaacacaaactaataacaagtctatcatatggaaagtttgaatacgtaacatctcttggatataacccattttatttaactattaaatttgaggaaatgcattttatatggaatgcaatgtaaaagtagacaatatatcaaacatttggaagtcatcttgatgtctttgaaaccaaagatcaaagattgggcctttcaagttaatgagcaaacaaacagatcagagaaagaatttgacagcaatatgtctcttttattgatatctataatctacaattgtaatcttctatttataagtaagggtactaacttatttgaaataaataaaatggagatagttttccatttttttaaagagagtaatcaggattgtataatggcatttgaagaatttaaaggccgttttaataaaggttgaaagcagaagaaaaacactatctttaaaaagtgaaagaatattctaactagtaaaaatgcctgcatctcttccaaaagatatatccatggattggttttagaatatagaatttaaactagtgaaggctttgtcttaatacagcatggagtgaagatttagtgattttatgataaatctgatcaatgtagagagccaaatccaatgatttgatggaaacctgatttttagatatccgtttgccaaatggctacattctcaccctatgctgttaggtactttttgtcctatttgcacctttgtaattgaacaaaggtaaaactaaacatagagacatgatggatcgtatgagttacttcacagtttcagtgagcatttatggagggggagggcttgatgtgtgcccaggctgttgcacgttatttcaccttcattcttcacaacacacctgtgaggtcagaattgttatccctctgtttagagatgaaaattttgaagcatgggacattatataactcgctgcgccatcccagataagttagatgcatcttgtccaaagtttgcatggctctttggggtgtctctctccccccagccactgtattatacatatttcttataagagagtgagtctagactacaaataacttctatgctggtcagtaatttagcaggaatcttaaaatactttagtggaatatcaaaaagtgagaataaaagtaaaagaaattgactagcaaaggtaaaaatttttaacaatagcccatttttaaaaaaaatctataatttactctgaagaagcaagcataagtttgcatcataattcagatagtaatatgacaagccacgtttctaagttctgtgtaaaaatttgctcattcttttaaatttgcaagtgatagtttgtcaagattcaataggaaagaaaaagaaatctaaatacattgcaccacttaaggcaggtagtgtattaacccaagtttgatatacagttcttttcctgaagaccaattggaggcctagaagagagaacacaatatatgacttattatctttccactgaaggaaaactttttttttttaaagaaacctttctcaatccatttttacgcagtgaaaaattattattattattattattattattattatttttactttgtgttgttttgttctgttagaaaagatttttaaagtcatcgtttcttgtttggaaactgatgaaggaattataaagcatctctagctaatcaaagtagtttaacttgtgctcacaggattcactgcctaggatctcaacctcctaaaaacatctggaaaatgaactttaaatatgcattaaagtttctccatttctgatgataaaattagatttagaatcttttaaaataaaatttagacttcctttgacttctcagttcagtacatttttgtcttggtgtaggagatacttttatgcaatgtgtttttatgcaaaaccacagattccttagtccatttcagaaatattctgtggatgtgggcttggagaacatcacttctgtctttatcatgcactgcagctgattgcctagttctgagggagaaatgggttgcttgaatgaaaaaatgtaaaagcagggtgggcgcagtggctcatgcctgtaatccctgcactttgggaagctgagacgggtggatcaccagagatcaggagttcgagaccagcctatccaacatggtgaaaccccatctctactaaaaataccccaaaaattagccagacctggtggtgtttgcctataatcccagctactcgggaggctgaggcaggagaattgcttgaacccggaaggtggaggttgcagtgagacgagatcccactactgcactccagcctgggtgacagagtgagactctctcaaaaaagaaaagaaaagaaaaatgtaaaagcagtggtaatttgtagtataagacaattcaaagtgggatatggaagaggggggagggtagcaaaaatttccctgaatctgaagacaggggagaagatctatgataagtgaagaaaggaaggaaaagggtgtggcaaatgttatgggttgccagtgtttacaccagtggacaattcttgattaaatagaaatgttgttatagtttatattctctatttagtatagaccaaagacttaagttattttgtgaatttattacatgaatttttttgttgttgtttttaaggcaactttgtttgggaacaacatatacaatgagacctctatttaaggctactgtatagattgtaagctatgtttttagagacaggaaattggaagggatttgagaattacatcagggatttgaaaggaccattgcaaggccaacaggaagttcaataaatgcagagtgggttgagggtggtgaatcttttgtgatcctctccagccctaggcaagacatacctttggagagtcatgctttatattaagttaatgagatttgttattcttagtctatacacacttaatgtaacataacaataatgttttaaattactttccattgacattgccaaaataatgaccatgtttctcctgtggctttccatgtaatctaatttgataaggatttgttcattcagtgacaatatgtgccaagcaccgcagcagatgtttgggatatatatacgaagaaagtatttctgcccttttagtgctatgacctagttagaggtcagaatcctaatcctactctccttggccccagcccccagaaaagagcaataaagagtttaagagactgtttttctctactggaattgcttattaaaatgacctgtagaatagtaagattaaccagatatatacagttgcagaggcctcaaaccagacctgatgattcagaatctcagatgctagggctgagctatttgcatagtttaaaactccatgggtgactctgatgcacagctagggatggcagactcacatacagcagggttgatgcaaacacaagcaagtggggtagattggggaaggtcaggtacagctctttaaaagagtaagccatgagctaattcttgagatgttgagagctctttcctaggtagatagttaagagtcaggaacctgagcctccagctctgagcgcataatatttaagtgatgacatgaagaaggcataggcaagtccggggccaggacatagagggcttttctggaaagtgagaacagaatatgcaaagactgacttaaaagaaggaatgaagtcgtttgctagtgaaaaggaaagaaggcctatgtacctggagcacagagagcaagggggagccggaggagcaggaatacatacagataggcagggaactgagaacaaagggcgctgacagccatgagaagcactggactggatcctaagagcaagcattgaatatatattcaaatcctcactttcaggccaggtgccgtggctcatgcctgtaatcccagctcttcaggaagccaaggcaggtggatcacttgaggttaggaattcgagaccagcctggccaacatggtgaaaccccgtctctacaaaaaatacaaaaatgagctaggcatggtggtgggtgcatgtaatcccagctactcgggaggctgagacagaagaagagcttgaaccctggaggcggaggttggagtgagcagagatcacgccattgcactccagcctgggtgacagaaggagactctgtctcaaaagaaaaaaaaaaaaaaggaagaaaaaagaaaaaatcttcgctttcatgaggtttggctgactatgacatggatagtaagagattggagatgggggacgtgctattatattgagcaggactctaagaaagaaaagatgggaacttgtactggtggggaggggcagtgggaatggagaaaattagttgaattggaaagatattaaataattagaattgagaacccatcaaacagccaggtgagttagtgaaactaaaatcagcaattgttgcatatgtcatagcttgctttctgctttcataaaactgggctaaaagtagaatattaaaaagtgttgtagttaagttacagcatgtaaaagtgtatgagtgtgtgtgtgtgtgtgtgtcagtgacacacatatatcttttggactttgtattagaaatgtaaaactgggaaaagctgtcatagaaaaataaaggagtactataaataaatcagctaaataataaaatcataaagaatatttttaaaagtcaggggctaatccagtcacctaaggacaaatgtgattattctagctgagagggctgtgtcaggccacagatactctgcagaaattatagtgaggccaagcctttctttttaacaaactagaatgaatagcatgcctaatgtttactaaacatgatgtggcattcctcacatagtttattttatttatccttatattttttcttggggattagaatggttttacaggtgaaaaaattatattcaagataattggatggttggtccaaggccatatcatgcatagtcatggttcctggtacttaatttgatttggatctctctgataatagtgagttgtaagtttacctttattatttgaatactgtgaacaagttttccctgcagcacaaatccaagacaaagacttttgaagtcataaattggagatgggtcaacatcaggtaaccaaggaaaaatgggatgttcacattggtgacaaaacaaaattgaggaagaaagatttgctggaaaacacaaagagacttttaagagaacaggaaagaaaattttctgaaacatctttgaaggaaatgagtaattggggagaaaattcaatcataggaagatgagagaatcagttcaagttgagacttaaaaggcaatgaatgttcagatcaaacccagatggattctttgagtttagattagtgccttttaaggggtgattatcagtttttcatgtaaagacccaatctgaaggtcttgttgcgttggggtgaaagttgtcagggcctctttggtctgatctgaaggaaaggtgaagtcttcttctaacctctaaaaagccagcagagattttcatggaaaaatacttccttataattccttgggcagtaacttatttgctagaataactagaagtgatgattagtggggaggaaaaggaggagagcggtgctcaggctctaatccaccagctgggattggaaataaatcacacagataaattcgaacggctggagcactgtagtcaaaaatactaaagaagccacagtaaaaaaaaaaaaaaaaaaaatgggtggggttggggatatttatcttctcatagacttaaggttttagaattaggagagatcatttatacattccagtgtctgtcattttgcagatgagggatgtcagcctgaagtgaactgacttggcaaaagttcacacatttaagcaagacaaaccactcccctgctcaaaaacctctgcttattatctctctatataaatatataaagtcagaacagcatggtcttaattctgatcttccgagatcttgtctcaaactctgtttcttttctttttttttgtctttttcttttctttccttttcttttctcttcctttcttttctttttttgggacagagtctcactctgtcacccaagtgtgctcacagcttactgcagcctcaacctcctaggctcaactgattctcctacctcagcctcctgagtagcagaactacaggcacaggccagcatgcccagctactttttgtattttttgtagagagggggttttatcctgttgcccaggcttgtctcaaactcctgggctcaagggatccgcctgtctctgcctcccaaagtgctgggattataggcatgtgctactgcacccggctcaaactctatttctaatttaatgtctgcctctaccccctgttctctggatggatgaagatgaactattctggacaaattttctttgcatagtggttcaaagtgtcaactccgaggccagagtgtgctgtttcaaatcctgtgccatggttttctaatctgtaaagtaaggataatagtgatcaatcacagagggttattaagatgattaagctacttttatgtcacttaaatcagcacttaaatttcataactagaagctaagtgttagctttcattacattgtattttattttttaacaccttaaacactgggaatagcaagctgtgtagcaacacatgcttcctgccattgagtagttcacaatctagtgaggaaaacaggtgtcccaacagaccattccagtgcagggtggcatgtcctataacagcagcacaggtataaacgtgggtcagggggagaagaacagaccaggcatccaggcagctgggggccatggaatgggaagacttctaatgagtagcttttttcaggaggatgaaaagtcaaggaaatgtttgtcatagggcaagaaggttccaggcaaaagggaatggcatgtgtgaaagcacatgcttgaagatgcaggtcatgtatgggtaatggtgacatctgtgatatagccagggtgtggatgacaatgaagaaactgggtgaggaagtaggtttacactccttgtgaaaggccttgtggattcagttaacagttcagatttttccctccgtgtaggcagctacaggggattttaagcaggaaaagacatatttagattcgtagattggtttctttaagagataactgtcgctgcatttccactattagccttctacctgtgaattgtgtttctgttaatatttaattttggactgtagcaatcaatctcccccttatatcaatgttgtttcattgtctagttgggaatgagtataagttatcaaagtgttgcataaaggaatcagatactctaataaatgtttgtatgttggttatagcaagtacaggaactattaaatgaaaaatcagaatttgaattacctcatttttaatttattcttttaaggtctgacagcagccgctgcagcagctgctgctgctaccaatgcagctattgctgaagcaatgaaggtgaaaaaaatcaaattagaagccatgagcaactatcatgccagtaataaccaacatggagcagactctgaaaacggggacatgaattcaagtgtcggtaagttttatgttcgctgaaacttattgtgatcactttgctactgaattacagtaaatgcttttccagaacaaaactgttggctacccattcaaaaagttggcacttttagcttgaaaacactgtatgtttgaggataccattttgcctctctaacaactaatgataattgttcattctaaaggaataattagcaacattatttttaattataggatcaactttatgtctgcaacttctaaaatcattcagctaacatcttttataatacaaagtttaatcaagagaattctaaaacattgagagtagctaaggtgacagagaaatatgtacaaaggaaaccctagactttacttttttattcttttaatccatttgttatcaagtaagaaacttactaccattggcagcaaaacatataaacttagccctttcatatgctgcccagaatacagattatgttgatgattaattctttctatagataatggttaccaaggtctctccttttaaaaatatgactttaattttcttgattttttttctttcctaccatatggagaaagatgaaaagttaactgtcactgtcaaaccaaaagggacagttttacctgtgccaactatccatttgggtaattcattttgtcaaacacaacttcaaatatgggttaatttttgtattaatgaaatccttagcatctggatgttgtggggcaaaacattttttttctgctattgcacttgtattgtttctctttaaaatacagtgaccatgctcaaaatataattaacaagagaaatttggatactacaagatgtatgcaagatactatagccaatgtatatttatgaagaccctaataactcacggccattcagttaaattctcttttccatgcagcattttcatagattatttcttaagttaattgtcagctctctactttcaatccattaagacatagttaagggtatataaaggaatactgtggattttagtaacaatcattttcacaagagctgtctggaaacatacacagacatgaatattagagtaaaatatatagacaaaacacaaaatactgtttcagtgatgctaaaaggcagcttttgtaatgtaaaaaggggaaaaatgcatcttttcagcacaactatgtaagggaaattgcaaaggaccagcagtagtggatttgaatggagagtaggtgtgagtgcgagttcctagacggatgaaaagacatggaagagagccaaaagagatggccctacaactgcagaggactaaggataatatctgtgctcatgtttgtaatgctcctggagggaagacagggagggatgaggattgtttcggtcatggtttacacacatatatttagacatttaaaaattaaaacagaattgaagcaaaatgcaagaattataattctgtttttagaactattactttaaagtaaaagccttttattagactgagaaaatggggcactgttggacactttttaaaacaagtaattagccacttatacattatatctattattacaaaacaatctggattgttttcaaaattttagaaaaggaggctgttcatgaaggctgttcttaatagttggttttatgagaagggattcttaaaataggcaatttaacaacatttaaagcaaaacacattaaaacatggtatctctgtttgaattttccagagcagaagttggctttgcagaaatcaacaggcataagataaagagaacatggttcataattaagcatcaacatatttttcatatttgatagtacatgacaatatttgcctactaaccaaattgtagcttactttaattattttggtacgtagcctatcgcaatgacttaaaaacaaacaatttgaattttcttttgtattttagctggaataaatgactttttttcattaaggtatgcagttgatggatattactattttttagttttgacaccccccatccaacgccaaaatgaaccaagagcagaaatttacttgaattttcctagaaagtcttaatagtttgagattgtgctaacataatatcggtgttgctgctagtccctaaggcattcaggtcatttatattagatatctgtagctgatttgggcaaaaagatgttatcattgtaattttcatcctattctcacatgctgctgtcctctaagaatttccaatttataatatccttcctgaacaccttcaccccaggtatatatctagagatcaagtaaagtgattttgggagggatgtggtaatgggggaggtacaaagcagtggtgaaggtgggggttgagctgcatcaaagatcaaagcaattcctgaattgcagctttgatggccacaatcttctctggttctgaggacaatgcctgcctcttggtaagtgttcagtaatgacttgctctgtgactttgtaaagtatgtaaactttctgagcccaaaactccatatctgaaaaatggcataaataatagtatcatatcatgagaattaaaatacttgtcacattatttattacaatgtctgcttatcaagttgtttggtcatcagtaaggttggtagattggggattgcttttgctattattattatgatttcttcaaatctgtcctcctggaaatcaccttcttcctttcttaccaccatcaactgcttccacctgcttttccattgtctctggtagctattacttgctaagctgcaggcctgtgaggagatttcagggcagctgttgcatcttagagattttgtaggacattcaatattagctcattctaggaatacaaaaataatcacaacacaggcccaggactcaggggcatacagtctatggatgagataggtaggtaagcaggcagtcataacaggatgtgctgaatcctccaggagaaccgattaccatgaagtggttaggaagcggtgctgaagcacatgaattctagaaggaatcccaagaatctccaaggcctatattttagaatacagactgctctcatgaatctatcaactgttgactctttgaagtagtgaaacccttcagaggggtgctacttaaatgatgtattgttgctactcagtcttgcccaaatccggtgacatttctgaagacaattcaaggctcttgttttctcctgcactcatctagctcataagttctgttaaacattttaggctttttttttttttttttgtaagagcgttgtttttttccttgattgtaaatgaatccttaaagccccagataacagattatgtttttgctttgtttggtttgatttgctgggtaagacgacaggaaaaatttgtatcacacaacccttcccggttcataataggaaccttagaaattagccagaaaaagatgtttaaagaaagctttgacaatggtgaataattattttatatcccaattttacatggtaaccttgagctcatatctttccaacaaaatgatcactttaggaggaagtgagcacctgaggatagatccgagtgaggcatcagcacactgagtaaaatatatggccatgtcgccattctccctcatccacaatcaattggattcttttagtttaatatttacttgctaagatgagatgctagtctgcatggtgataaacagtctgctcttggcatctgaaggtgacctgtcagttcatatggacaaatctcctgcttactgaaatgtacaaaataaatcattaaagcaggcaggtgctcattcccagatttaaatcaccatagatttatgatttgaattaatgcttcatttggccatagaaatagatgctgagacagatgatatgcactggttggggtttccatactgtagccatcctgatattgattactgagatgtctttgcaatctcttgtttatatcaagtactatcttgtgacaggttggctgatatgagctacattgcagataagaaggaaaaatgtcctggattctttttagtggcaacactatccacaacatacaggccagataagttgctattttttttgctttaaggactgatctacataaccagcttaaaaaatgctgcttggaaattgggactgggataatgcaaaggcggaatttaaaaccggtgaacccaaggtcaatttgatagtgtctatagctatgttttaatctgtttatcctttttttggcattatgcacacttttgagaatactaaattaatcacaatcagtttaatctaaataaaggaaacttaattttacttctagtttttaaatagtatataaatattgacatagtgagcatctcttaatcgtttctatgttatttaaatacttgctaaacctagtatcttactcccttccttaatgacaacaaaggaagtaactctttaaagataaatacattaaatattattcccaagtgcaacattttgtggagtataatttaccaagaggcaggaaaagactgcatttttacttctcttaacattttatttaaggaaaacactatgtatacagtttaaaaaatacttggaggatttaagagggacctttgccactagctaatatctgactcatagaactggtaaacagctatcaacaatagtagattgcttgcttagtaggaaatgagttcatatctattcaaaatgtaatctcaaaacagatgtcccaagaaaatctcattgtttaaaccatagtcataaccttctaactgctgtaatttctttaaggaagggaagtacttgtaagactttagtattttctctttctgaacattgtggaacataggcaagggtacactaatgccctgatcaacaaacctgaacacatttcacatgctcaaaacatatgattgtttttcattttctcaaacttgtaatcgttacaagaatgtagaagtttcaagtaagattaaggacttgagtttgagaataaagccgtcaccttcaagggtatttatcactccttagttcttctattcctcaaccaataaaacaaaacaaatatatgaagggaaaaaaagccaggcagttaaagagataaaattatcttcttcagctcaccctactcttatctttctttaattttaaccattcctgcagaaacaaaatagtttatgctggagtcatttcctttcttctaacacatgtgtctatttggaaggaaaagattaattttatgatttcaggaaaaactcttggagaccttgagaaagcaaataaaaggaaactgagaacgcaggccaccaagcagagctctgcaattgcacattggattctctgccttggcaatgttaatgaacctcaaatccttcctataattagatgagggaattgcttatattttcaaacagatgatgctgctataatgaaacgattgacagggaatttaagagtgtctacagtagtcatttggtttctgttataaaaaaaaagtttaaaaagaagattggctttagacataggtcctgagagaggtagtaatttacatagcatgctatgacaggtgtctttgtatagtaaggaaataaaatggaagactagagaaatgatgggcaggtatagcaattttttcagggagggggtgtcctatgcttattctgcttaggttctttaaaaggggccgagactcaagagatggagccggattgagtgcacagctgtaactgctgatgagctaattgctccttatctctcagccccattcatcttcattttttaccaattactgagaattatctgtgttctcagttggatatgagagttaatcctttttggttaagctggcagtactgtgagcagattccaaatcggagggtgaaaaagccaaagcaagcttgctctaaaaatgtctccagttcaattacagtatcactgattcacaagaaatttgctattgtttaacagattaaatgtagaaagtttttttgtttgtttgtttgtttgttttggtaactagaatgtttttctgcctaacaatgatttttaagatctttcttcctgcctggtgagtaaaacttaacaatattaacagccagtcttgtaaacgtggagcatatacaagactaccctaaaagtccagaaagattctgacacatgaaatgagaaatattttagaactgatagctgtcaattaatatataagtagtttaattaatgaatttgctctctgtagcttcacatgtggtcaagaaagtatgttcaaatataaatcttttcacaaatgtcccattagtggatattttaatggaagaccacataagcatctcttaaaagtataggaaccaccatggtttgtaattcaattgattaagaataggccatatggttaatatcatcccctatgcaaaagatatcttcatatcctgaaatttttacacaaaattgcttaccccaataataaaagacaaaaaatgtactaagctactattccatcaatttaaatgcatttttaaatatttactatttatggcaatttttcttcattatgtattttaaacaagatagagaattaccagtttgacaatgattaggaatgttgttattaaaacagtatgtgcacttcactttcaacagctttgaattagagtctaatgtgaaaatctaaaggataaatggctaatttaatacaagattatcaaaacatcattgtgtaaaatgtgaatatgttattgtgtgaccaagtaagtccttctagacacagccaaaaactcaggtaggggagcagagagcaaaataagtcagaagatttagcttccagtaataatgtagttaataaataacttaactacttagataagtcacttaactgctcgtcttttttatttaataaataaggaatttttgcctaatttctctgttggctctaaaattctttgatttttgaaacctcaataaaagataaagggcaaaaagatatttttgacagtaatttttaaaataaaaaatcagaagtaaccacatgttccaaaacaaggcatccttaagtatactataacatctatttacatattatgcaagcattatatgatggataagtattgacagtatttattttgaatataaaaaaaggatgatgccactttttctaccttggtactatgtatccttttcattagggtttggaagaggctaaataagagttaacattgctatgttattgtggaaaaattatgaatattaaaaaatatagcttaaattagattattttaaaatgtcatatgagtatattaataactgatcattttatgaagctctttttcattattttctagaaattggatagcattattctgcattttctctcataatttgtttttgatctttattgttcatgtaaaggaatagaaacattaatgatggcaacaggtgactgtggaaaaatacatttctatattaaaaaaatcatttttcactttgaaatatttgaacacatattcttaaatccatttctatatgtaataaaatcattacagcatgatttataacatgtactagtttcctatataaactattaaatgtatttttgatgcagataagcagaaggcagaaaatatttttatttttgaatgtgatgtctattccacttcatgaaaacttttttttacttatatggacagttggagaacataattcaaaaatattatgcaatgtttttgttttgatttcaatattgctaattctaactaatgactagataatagagtaaacctgttaattcaagcatatcatattaggaaataaaagttaagtgattttatttgacactatatcctcatgtaattataaaatataaggatgtatataggatgtatcatatatataggatatatcctaatgaatatgttatgtggtagactccattacattccaggaggatgaatatgttttcatcatggaaagtcctggaaatggtaattatcaacctacaaaaacatgctatactgtttacgtaaagtttgtaaagaaagtaaaaagaaaccacatatttcagtgtaaaataaccccaggtcatattcaatttgtttaagatcagacaattctttttttcttcattaatatgatactcgattgttttatatttgaatttcatatgattgatgatgagggattaaaataaatatttaactttgttttataaaatataatgtttgctaatacatatttttaaatatctcataatgtcttgatattaaaaatatatgtttagagattttactagggtgtttgtagtccaatattgttttgaatgtgtgcacacaagcttataactctgagcccaatgcacctgtcaccagacctagtatttcacattcacgtgaccgtgattcatctctcagttgtacaaatattcccaaattatacaaaaccatttgtatcaatcatgacatgtgaaatctaatataaaatagtgaaactaagcgataataaataaataatatagtagttgacataaatgtctaaaaatgtcaattcattaagatgaaataatgtagcacacatagttttgcgtgctctttatgccccatccccactaaatgaacccagataatttggaagataggaaagaacggaggatttaaatatggttttctttaacagcaggtcataatggaaacacagacccttacattcagtgctgagagaattaccagtttgataatgattaggaatgttgttattaaaacagtatgtgcagttcattttcaacagttttgaattagagtctgcactaatgaaacggatacggtttccttcacaaagggcagatctgttagttaatatcgctgcagcagtgcctcgcagaccatgcctttagctctatttgtatttcacagcatgataagcaaagagtgttgattttcaaggatcctgctgatgaaaggtaatggcattattacatctttatctcaaaagcagaactgagtggtaaatgatttttttctatgttgcacaaaagatttcttggttagaaagccttttttatttctttacatcgttttagtcttggaaatgatatgttattatttaatgtctgcacagcaagcttgaaagcacctaatagcgaatggattggaagtgaagtacctcctgctcacagatatggatcttctcagtcacacgctgtaccagctgtcatcccagccatactgctgtgatttaattagtctgtttatgtcctttctaataatatttccatctctatgaaagggcaaatgcgacagggactttttccctttttggttctgcagactaaagaatgtggcctatatctgatatgtggggatgcaggattgaatcaccattcctgtcacttcaagctgttgataaattgttcggccaaaaagtgtagtgtacttacttccttggggtcatttgtaggctgggagtaatagctgcatagcgacaaagaagtgtgtgtgtgtgtttgtgtgtccagttatatacattatatatgtaatatatacaacatatatatgcacatagataacatatgtgtgtttaaaagtttaaaaattataagaaaatgtgtactttgcatttttatctacctcatgcatggctttatggcacatatttaagtctttttatcaattgagttcatctataattgcagcatttcaggaattctcaggaaaatgtttcacttttctaagtaaaactttaaaaaaaataaataattcatctatgattttacttctacatcagtatagattatgatctttggagaaaatatatgtttcatactggaagatactacattttaagatatctgagaaagacatcatcatcctcataaaacatttaatatttatatctttacttagatttttttcagaaagcatatttaacttaaaatgatagctgaagttcaaaacatcacactgaacacacaaaattatgtaagtatatgtaaattaataaacaaatgtaaaagtgttatgacattatttaatataatgtgctgattaataatttatactcaggcagtatgccatctgagtgacaagcctacttgaaaatccagtggccttagaaattttcttctgctttcagattctatgaccctattatgttcagaagacagatccatataatagagctgaggggaaaaaaaagatagattttcaaaatcaatttcaatagttttcattttactcatgtttgtttttgggagaaatagtctttattatttataaataatctgttaatcagttctatgtgttttagtctgctttttggaaatagtttagtgtttcttcatctctctatagtttaagtgctgaacttgtgtcacaaggacttctagattatcttgcttttgcttgtatctttctgtttttgctcgctcatgcttcacatttgcatatcctaactatatttttggaaatggccttattaaaacaatgggtctatcagataatataagtctgatattcactttacataaaaatattaaagttaaacatcttatcaaggtggtcaaattagtttgtaaattattttctttagcaatctgaatctcagcctcctacagttaccagttttaaaaacacacacaggcacatgtttagtttcttctggtactttcacatacctgccactgtccaagcctatgtctatatcaagagaaaaagctatcgtctagaatatattaaaatacatgtatcaaaatgagtgtaaatattatacaatttcctatttctattagtacatattggcactgttttctattgtttagaatccttacttgataatatatgaccttagcaattacataacttagctagacactcatacacaaaccccacataattgaatccctcctacatttcagcttccaagaatctctcattaacttaatacaaatataaactgaatttactgaatatattcatttttgtaatctgttttcttaattattttattttgggaaaatatagatatatctactgtcttttcactgaagtacaatttcaatttctctacatttactctgctgttgaacctaaatgttgacgattaagttatcttgacatgaaccatttgatgctttgaaaaaacccaccatgaagcatttgatggtattttttattaattggataaatgaattgtgagatgtgtgattgcatgatgatgtactcatttagttgttgctttttgcttttactaatctctgtcatattggatttataaatggaacagagtgacctttgaaactgtgatggaaatgaagagataaacacaacttgaaaggacaaaccaattaatatcaatgtgtttgttacacatacatgaggaattttaatcctttgctctctgcagtacatttgtggttcatttgttgagtaagggagcatacttttttatagttacagatttagatcttactttttctaaaatatataaatttatatgtcaccatatatatatatacacacatatatatataaaacagaattagattatttttagtgcataaaatgttttcagcactacctttaaaaattttgacaatatagcctttctagaaaacatttaaatatgtattcacacctatgcaaaaaaaaatgcatataaggtattcatgtgcattcatcttatgtattttaaatataaatacattgtaatcttaagtgcagtaaattattgaatagaccttggttttgtaaatttagacacataattgatcctctgccattgtccctagaatactttctaaaattcctgattcagggatcatcaataaagcatttattattttaacccattgacctgtaatattaaaaagtattttttaaaatcaacaattatacttgagtaggcttttaaaataaaatctgagcagtcatttatacattatttttacctcgtgccttccccagtttttatgtaattaggtttatttttcttaaaaaaaaaccctaattctgctgtagtgtggattttagtacacttgcacattctacttcatttaatagcttaattatagaatataatcaatttaatatgcaggttttgaaatattgccattgatgcacaacaaggaaaaaagtaatacaagcttgacattttgaaacactagcattgaaagactttaacttctaattgatttttaaaagagttccctggaaaagtgagctcagaaatgtttataacagctttggcaacattccaaaatgtttaccacaaagcataactcagcagtttctgagtttttctatcaactaagaaagatgtgtcctataattggcttaatccatgttgatattgaaccccccacacagatgttatctttttaaagacataaattctcaaaatgatcacttcaatataagaaatggcttcactttttccaaccagggaaaaattctgaacaagaaagttatggatgagcaaggggtatatctttatattttgtgaaattacatattttatttcctccttgcccttccaaaccttgtttagtaaagctgacaaaaagaggatgcattttagatatattaatatcatagtcacttacggttgactgtaggtgtgaaaaacttccacagccagctaaaatgttaatggatatgacatccattttattttaacaagtgagcagaccaaaacaagtaacattgaacgcagaaattattttaaaaggctactgctaagtattttttttaaaaatgattctgttgactagttgtttgtcagttcctgtactttttttattgattgcttttgaatatatagccccatgattgatgccaagcctacgtccgtgagtgaaaagagctcaatttacacagaaaatgaatatacaagctttatttatatctgtactttctaatattaattttgtaatgtggtgtttctttgaaagaggtcatagagtagttgtaaatgttgttaactattttattcttccgggtctttggttttagcctatttgctttttcacaggtgtgattcagggcaataatgtgatatttcaaagtatgttcagccagaatgaatcacttattcataagcatttcttttttgagatgaagactgcagcataattgtataacatctacttattcctccaggaatctggagtgatttgtggtttgaaatttctgtatcataaactcatgcagtgcaggcagtattacatttagtcaataaccaggaattctgattagttggctgtaaatcatgaatgttgagaaataaaggtgacaaaaacaattaataaaaaagaaataaattgataaaaacaggtaatacagtagacagtattccctaatttgtcaaaaccatctataatccagcatgagttctaagaaataggtctgcatgcaaatgtccctcaataccaaattcacatgttttgtaaaaaaatttgaccctgctgggcagagtggctcaagcctgtaatcccagcactttgggaagccgaggcaggtagatcacctgaggtctggagttcgagatcagcctggccagcatggtgaaaccctgtctctaataaagccgggcgtgatggtgggcacctgtaatcccagctactcgggaggctgaggcaggagaatcacttgaacctgggaggtggaggttgcagtgagccaagatcgcgccattgcactccagcctgggcaacaagagcgaaactccatctcagaaaaaaaaaaaaaaaaattgaaccccgaaactgcattagaaacaaatatttaaatgtcataattctctctctctctctctttctatgtatatatatagatattcccacttttacactattctgaatccaataccctattcttttctcatttgttcattttagagacaggatctcactctgtcattcaggctggagtgcagtggcaggaaccatagttcactgcagcctcaacccctgggctcacatgatcctcctgcctcagcctcccaagtaaataagactacaggcatatgccaccacacctggctatttttctttttcttgtagagacattgttgcccaggttagcctggaactcctggcctcaaacgatcctcccctcttggactcccaaattgttgggattactgatgtgagccaccacacctgatcttcttttctcatttagagaaaaacaaaataagcaaaaactcctgcacataatgaaattggacataactttcatttcttaggctacaatactgttccagtatagacaggtttgacctaaaattccaagatgcatgcatacctgtccttcatgcctccagctgttcatgcatgcatcatttccttttctgttcatcctcacacagctccagtttcttaatactctgtaatatctacctctagtctccccaaagcaatctttggaagtaagggggaggagagagagagccaaaacatggaagtgaaaattgggaaacaacagaatgtttgtggttcagcattaaaaatacaaaatctggtgccatgtggttttggtgtaaaacatgacttttttgtttgtttgtttgtttttgccattgttaggacatttttgccttcttacttagcctctatgaatctcagtttcctcatctgtataataggtataacaatttgaaatattacatagggctctttggggattatttgggttaaattagttctctgaacactgcttgatacactgcaatcactattctaaaatttcttaagtaggtaatagaagtaaaataataaaggtgtacatacacacacacacatgaacattcatagatgtcttctaaaaagctaagactttccagtattcccagagtctcaatgttagttcaaatcatatagaatattgcctcctctacatgccctcaacattcatttcttatccaagatcttcattagttgatcatgactgaatatttatccaaagagtgtcttatggattatttactgcagtctctgagcctgtgtcaagctcaggaaatatgctacaagattcagattacattgctacactttttaaaaagtacgggcacacaggaagaggaaagttgtcagttatttcatctgcatatttttaaaaataaatcaataatcagccagtaaactttaattgaaaagttttgtctcattttatgttatcagacaaaatatgtactccagctctaaacacagacattactttattcagtgcacataagacttcctttaattagcccttaataagcttggtttaactgggatttaccgaagaacagtggtcattaacattagccagattaagactgtgttaattactattgatagataaaataacgcctaaaaatggtttaaattatttctacacttatgaattgaaaagaagtttgacacttttaaatagaagttgtattttatttatactttaacattaaataatgacttctttacatgtaggcctacaacaatagaacataagcttttatagtttaagttttacagcttctttaggtttaccataaacatgggataatcttaaaatataaattttgattatttcctgggatataaatatggaaatttttacatttacttttatgatttatgttacatgattttagttagaaacagataccttacttatacgttatcttcagaagacttagttatctttttttaaaaaaaaaactgatagattcaaatgatttcttgtatttggagaggattttgttacatttgtggcttttttttttttttttttttgagatagagttttagtttgtcacccaggctggggtgcaatggtgcaatcacggctcactgcaactttgacctgctgagctcaagtaatcctcctgccttagcctccagagtagctgggactacaggcatgcaccatcacacctggctaatgtttttattttttgtagagatggagtctcactgtgttccccaggatgatctgggacccctgggctcaagtgatcctcctgccttggcctcccaaagtgctaggattactggcacaaaccattgccaggcatgagctgccctagttttggcatttttatattaatgatgtcttaatgtttatccttagccttggtgtcacttttccccatcatatatgtgtgtttaatagtaactgaaatttgggttttttttcctccatgtgcataatttcttggacattatatcaagttaagctatttctcaggattctgtaaatagtttctgtgttatccattcctacatccattctcttgaaactactcttgcagaataataatatttattggattaatgtgtatgaaagcaggtcaactacccgtgaattctggatagacaaaaccaatggaattctcctcgttttcattctgcataaaattatgcagtccaatggttaaattctatagttagtggtaatatactctcccctccatgatgatttaaaccattctcttcattaaaagatgcataacaagaaccttcatatagttccaggcaaaatggattataaataaatacaatcttatgcctctgcatggactctgactttggtcagtcttccttaagctcagtacatagcaatctttaagaaaacaaacgaacaaacaaacaaactcagatgctgggcgtggtggctcatgtctgtaatcccggtactttttggaagccaaggcaggagcccagcctgggcaacatggtgaaatcccatctctataaaaaatacaaaaattagctgggcatggtggcacacacctgtggtcccagcaactcgggaggtcgagatagaattgtgtgagcccaggaggtccaggctgcagcagtgagccatgatcacaccactgcactccagactgggtgacagagggagaccctctctcaaaaacaaccacaaaagcccacaacaacctcagacagtcaatctagaaaattaggtttcatccttaacatgtgtaatctgtttattcttcctccaaaccatatctaggattcaaattcctctttgcactgcatccattgccagtgcgataactcaaattatcagcactccccacgttggccactgcagtaaccttaaccagacttcctgttttcactccttgtctttttaaatcctctcgccttgcaacagctacagtgatgattatgaggcataaattcattcataagatttccttttaaaaaatctttcaatggcgtttcattgcactgataataaaattcaacttccttaacatagcctgaaaagactctgcataaagtggaatgctcctcacctcctctctcaaaactcttgggttattcttccccttttcattcttcctgccacactggcatttctccagtttctcaaacagactacgtcctttctttctgcagatgttcttaaaaactggccagtggatctctgttctctttgttcttaaattttggaattcctactcattttccagtctctgcttaaatgtctttcctcgaatgctaaaattaaaatcagttcttcaagtctgctccatcctatatcaccctgttctttctgttgcactttgcacaatctataataacatctttatttgcaagcctgtttgcttcataaccatcgtccttcctgagaccatcagcttgctgagggcagggcaggcctggccacattgactggcatgcactatcagtcaattattcaacaaatagtcctgaatgaattcttaatgaatgagtactcactaagcaggaatgcttttgtatacattatttttgttactacaggctgtcttattcatggaattcctctagatgcttttccaatagaatatttccttcattttaagctgcattttgctcaatgtcagcattccagagttttactatgtagggtgttataatctcattttcttgtacaatgcacgtctacatttacttattcttttcatttaatctggaacataaaacgttaatattgttggcatttccactttacagatgagtaacttgaatcccagagaagatcgttttttgcttgacattatgtgacttttaaggtcgtgtaatgaaggcagggtctactgtttggactcccactttggtgtttactccaggttattaggtagggaaaataaggtctaatctttttttttaagaacattaaattagaaatctagaaatttgagttctagtttagttttgccagcatccatcttgttgaccttgatgacataaggtaaacattttgtgtcttactgtattaatttggttgattacagccgtttggaatggaaagttctcagtttatataattacattattgtataatataatataacataaggaattggtatctttaagtcactcaaattaacctccatattatggagtgaggagaaaggattctactatagcatttcaggagcataatatatatacagcgttgagatttctgtggccataactcataacactatggagaatgtaaaataaaatttggatcggtatgctatcaactttgttatgtatcactttccatgttcttacccttgcccaacaaattcccctaaacttataacaacaaaaatatcttttgtgatgttatatccttgtttaatacctttttattcatcctcatacgattgtccctcaaataatatgtattctctgtatctgagctcttttacatagtattggattatactataaaccctttgtggcagggaccttgtctttttatttgctctataaaacaccatgcacatcttgggaattttatgaataataataaaaaggaggcaaaaaagctttcatcagcagtgttttattttgcatgtgaatttagagatgaattcataccattgtccatatttctggagaaatagctgcttatattacaaaagttgactacgaaaaaagcatgtaatattaaatctgaaaatttacattgctggtatagaaaaaataaatgaagcaatacaatttgctttttcctgccctttataaaaatattgccaagtctggcatgtggttcataaaatcaaacattttctaacacagctgtgcatgaggaaatgaaatacggaaggtataagaaaccacctgtttgccagaacagaagtttcaaaaaagataaacagcagaattttacatgaatccctgttgaagatctattccgctattaatactaaagccttaacacttattcttcaaacaggtgttttgcatgtgaattgaaggctgaataagtccatggacgattcattagtaaacaccatttttttaattcagtacacaagatgatattgaatacaactgtcaaagataattttgcaaccaattcagttttaaaatctaaaattataacaaaccgcaaattcctgtttattccaaatgctctcctttcccttctttatcttagtttcaaaactctcatgaacttgacagtgttctcccttgatgaagagaaagtctgaattatgccataaatcatactgagctaccagagaaattcaaattgctgtaagcacaagtgccgagggactgcttatacactgcctgagccataatgcaacgttcacaacgagatcattgcatcataatctcattctgactgtgatatgctttgtgtgtatggggctcaaatgtcagagagagagacaagagtgattatcaggttagattgctctcctattttaggttaaacaaatgatcagaaaaatacattagcccgtataaaatatttcagaattaaaaacttccccaaagatttatctgcatgagacacttcttagtatgctttgtctaggtagatttaacactagaagttctagaaacagttgagagatcttttaagatcctttttcttcttgtttactaagtgttagtaaactctttgcaccccaaacaccaagcttaaagagatgtcaaacaacaaaaaacttcagaatatttctaatcaatgtagaaaatgtatatatggaaaaattctggtgaaattattattatactcatatgatatgtttttgtgttatgttaatgtattgaatctttgccagtgcctatgtatgtgcatatgtatgtctctgtgatttatgcagatgctctctctttaagatttatgcttggcaattatgagatgctttgtagtttgttctcatatataatagtaggaaattactaaaaacaaaacaaaacaaaaactagattttcccacttctttgcttgaacgaggggtagaaacatcactttgaatgaaatagtcacgaccatcgtaactttcatattctgtatgacagtagaattctgttcagtaaagcgaatataaacatttttgtacaatgctctataaaacatacagatatccctgttttagtgtccagttctcatttaatatcagatcagatagatattatattctagttctatttagtggttcatagaacctaattatgttgtccagcatcatctttcccacttggaaattctaggaagatgaccacatccactgcaaacaagaacattttttttttctatcagtgtagtttgcctcttttattttacagttttgtatcttatcttaatgaactggccatactttagaacaaagttgaatattaggttcttcatttcaaatttataaagactatgtctcatttctccctgatatatgatgtcctttgagggtttctgtaagtatatttttaaaaatgagaatgtttcctttttttactgactaccatccagaatgggtttttaataataaaattttttatatttatcaagataaaaagtcaacttctggctgggcgcagtggctcacgcctgtaatcccagcactttgggaggctgaggcgggtggatcacctgaggtctggagttcgagaccagcctgaccaacatggtgaaatctcatctctactaaaaatatacaaagttagccgggcgtgttggtgagcacgtgtaatcccaggtactcaggaggctgaggcaggagaatcacttgaacctggggagtggaggttgtagtgagccaagatcgcgcctgggctacaagagcaaaactccatctcaaagaaaaaaaaaaagtcaacttctaagggttttaactttttaactagttgtgtttactaaaacaaatgactaatatttcataagtctgattcattcagtcttcaatctagactaaagaagcatggtttcctgtttatagtatgtacacagcaccaggaaaacatcaacatatattcttaatattcttatccacatatcattgtgaaacacacgcggatgtttgtgtgtttatatgtatgaactaaaataaattgcaacggtgacttcgtatggtcacaaaaagagaaagatctgttttctggactagagatatggatgatgtggatttttttttctatgtatattttttagtctccatagttctctagaactaggcacataataataaacttcatattaatctatcatatttattggtggtttagaataaattttatactattgttgatgttgcttaatatatttattataaaattatacttgctttaaaggaaggattattacttttctcctttcatggcttagaacaaagcaaaagaaagcaaacaaaccaaaaatatcaattcatgtatcttttgtccatttgcatgttgggtagagttcctgttttatcttcctcagttatgccatgtcttcataaggagaggtacaattatctttatatcctcaaactatgcccatgtattctatagtatatactcaggaaattcgttatggccagtgcatgtaaagtttgcaaaagctcctattctcctattggcacagagcatgaaataattattataaaaaacagaatgaatttgccatactcaagcccatacatttttccttttgaagaatcattatacttcagtccttattaattctagaataatttagttttaggattaattataagtgaacagatataccatattccaaatttggaatattattcactgttgatataagttgagacattcagaatatgatgtgttaatctattgatatttgaggacttgagagtaaagtttatttttaagaatttctggtagccatatggtaataaatactgtctaaaagtctaatatagagtgaaaccttcaccagactattggtatgatagtctagtaaggtcagaagctcagaggttttatccatgctattttatacactacttatgttcttaacaaaccaacatattcattttctcttttgtaatgggtacatgatggacataataacatcttgttaatagttttcatagaagaaacgaattttaatgtgtattagtcttttgtaagtggatttgtttatatgtatgctggatgttattattacccacatggtttaaatctatatccatgataatatacatactgttcagaaaaagtatttttctgatgtgtatataaaaatgttttgcaagagattcacttgcaaattcagcattatctctcttaaggataaattcatgaggatgtgtatcttacccattttatatatatatatatatacacattgtaatctctattactaatatgcctaattcataatctacatctttctcattaatatggaaattgttacagagtatcatgattgtgaattaatacatatcacttaagcgttctgggcatcagtatcttcattcctaaactgagggaataaatgcagtaactttcaaaatttctcattgtttaaaaacttttattttttatgacactgttcctttgaaactgatacagctgacaggcagtctgaattttgttggtatctttcaatttatcacgttttaaacactccacaaagtcccagcccagaaacaggaacatgtgtgctgttgctcatgataatctttgtatatgctcagtgaaataagtttaccataacttagtagtcactttcatccagagaatttttcctggtggtattaaaacacaaagactactatcacactggtctttaaggggaaacaataaataaaacacaaataaacaagctcctaagagacaattcttattcacatttgctgatgattagaggtacacttggctttgaaagtcatgcccatttaacacagtatttttaaaagacttacttttttccatgtaacagcgatatcagaaatgcatttccttgagttactttgaaaaaaaattttagaattgttacatggcttagtacctgtacaatctaactgtctttattgagatcatagcatataaggtagaatgttttatacaaaacaataataagcctgtatacatgaatttaaaacaggaatttttaaatatcaaatagaagaaatgcaacgtaaggattaaattatcatattgtaaaaagttatgcaggtgaacaccttgttattacaaatataaaatgtagcctgaataaatctatgaaaagctcttttttaaagtgcaattatatcctgtaatgtgtagtttttcctgtcccttatgtttattttaattttaatatgaaagaaatgatcatcccattttctttgaaagtggaataaaggtaaaaccacaaaccttttgaaagaattcctttgttcccaatcacatgagtgttgttggaacaaaattttgccacctgccagaggctttaaaaactaaatcaaaaggctcactacttcaaaatgctcaaactaaaggtaggcttctggatgaaaatgtaatgactagatcattctcatcatacatttattacagtgcagcagaattgatggatcttttgctacctttcactagagaataattcataaatgaaaatgaaaatatttaaatcatgaatagctattttattccctcattctacctgttagggatctaacatttagggtgtctcactatgttcatattaaaacttcccaaaagaaatagagaggaaaaaggtgaagtatttctcacactagttaaaacaattcagtgttggcatgcttcattaactgtttgcatacaagagaaaagtgctttctgatgaagtggaaaaccaacttgggaccaattttccacaacataaattcaacactcattctacctcctgatacctttgtattcaaactatcaggaagattttttatatctgtcataccagtaatcatttaatacttctattttagattctgaaatccttgaaaatagttctattgtagattctttatttccttagaataattttaagatgaacatctactaatattttttcataaatgtgaattcattgaactgacagttatcaaactgatttagaaagaattcttatcatgtaagaaacataataaacagggtgttaaaatggacagcttaaacaaaatattgtttacattcaattttattctgtttctcctctctatataaaatatttgtaaatagatgtagatgtgtgtatacattcaatatatagttaagcagcataatgaaggtgatgtattaaacattactgcaagtctagaatatcatttattacagtactagcagaaaaatagtactctagtagattagcagaaaaagtgagtgccaatttgaaacaccattgttgatcactgtatcacaacagtgtagcttcagtgagataggtgagtcactctgccagttcaacacatgatagctgcaaagtgccaccaaacacaatgaagtcatccacagtccctactgagtctaagttattattcagtttattacatagcgttttgtcttcatcagcaatgttcaacaatcactttcaattacacggggtgagaatctgggagactgtcttcacttctctgtggttgtaaattcatattttctagactctgcatggggaaagaaaaaggacattataatatttttattttcataataaaagtaagacttattgaagaggaagaatctttcatttttcacaatatcataaaatatttctcttttaatgaattgctgtgagccaatgtttttgttgaaaacattctttgataaaagcttaaaaatgatataagcatacatgttttattatatgaaaagtaatcaattataaatattcacactgtgaagcattattttatcacatttagtatattcattcattatgttatttaaattttatttcattaaaacttggtatattattcacactaaaccaagtgatcttattgtgatttcataaatagaagtttgtcatactcgaacatatcttttgatattaaaaataacatcatgttatttcatttgtttctttcaaatataatatcatattacaatacattagttgtatcgttcaagctaagaatatattcccgatatgaagaatatgttgagtagtgtaagtttaatatttaaaaaatgtaattattgattcagtgaactaaatatattaaacatgtaaaacattagattcttttagtatacaggcatagtcatctttatggatttttcctgaaatgttttatgtaaatcaagagttttatctaatcaagctttaagggaatccactacttagaaaatattttaatataatgcattttcttaaagtgaactgcatctatagtgattttgaaattcaagccattttgcataaatattgcttatgcatgtatacatttatagaccactttgtcaatgggggaataaaaacaactgagaccaagagaagtgtttcggtttacatgtaaactaaatgagaccaaaggaggtgttttagttccctgtttgctattttgattaaattactgatatgcaagagagatcctttgaaagtccctttgttttgatttattagcagaatatgatgctagagctgataagataatgcttttgatgcaggaggagataaatgagaaattgctccattgccatgtgacacctgggttctctaaggtgtctagttttactctgttcatctattggctgagataacttccatttagatactgagagttgagctcagttaaaatacgtttttatatttttgtttcagttatgtcaccttcattagttttaattcctaaaaagaccatattattggaagcttataaagccgtaatttctaccttggaaaagtaacatttaacggtttggtttcatgagaaattgtccattcttctgagtgcatggtaatggtattggatgagttataatcagtcgtccatctggagtggttcttctgttggtctattgaatatcaaagtagtgaagttccactgtggaaagttgaaaaatttagcttgtctgtttttatttatctgttaggatacttagttcatttttacttaatcacttgatttgatgtttattgattcagtaagtatttttatagtaaatatgtgcttaggttttaaagcacattttaaagtatgagataaatgaaaaattaactaattggaaaataggatttgaaaatatcaataatcactgaagtttgtgaaattacatgaagtgatttttatattgcattttattattcattaaatatgacatcagtaaactttatttgtagagttttgaaaaaatgctttcattgtataagtcaaattttgtgaatgtatcccatcaagccccccacaatgtgacataatggcataaactaggagactaattagatatatcttcacaacagttatattcagcattgatgaaaacttcaatattatcaaagttaccctgacattcccttttgaaaatacaaataggcctttattctcctttgtaataaagaaacaataacttgtaatgttcataattttatttacatggagcataatatcggtatcacatacaaaatttaggttaattaaagcataaattttcaactaatgtaatgtatcccacatatatatctatttttcttgataggtaatttatataaaatattatttgttggagtatctatcccatttaaaactggccaacatataatattttaaaattcgttatttgtataaactagacactattttatcgtttcatgtgacacagaaaagaaaacaagttatacacctctgaatatggtggaatttttttagctatgctatcacaactctgcagagaggtggtttattttcctaaaataaacactgaaagtgatgcacagcccagccactcaatgcacacatttaacactcaccaggagggaggtttggtgtactgaacacactaagttttagatctcagaaggggctttacaacctgtggtgtaggcacacttctttgagtagaaagtatgtcattaaaatactgccctcttacagtgactttaaactaggatagttgcgattgtttttagtctgtacacagcatgagaagcattttggtattttcctggagtaatccaccattggtatacatgtcctaatgggggaaaccagtttcttcatgaaaagtaatattgattttaatccaatatgtcaaaaaaattcaatttttccaaaacaaacaaaaaagcaacgattgtggtgaccgttacattctgtatgtcactaccaaattgtagacaaaaattattaaacagagaaactgatcttaattttattacttcaatagccaattaaatagttaatttaagtggttctctgtgaataaaaagaaagcaacgtaattgaataaagtgtattttactagttaaaaatattcaagtagcttatgttggcatcacagaaacacattctcaatgaaaacattgtgtattgtattattaactcacagcatatgatctccatttctgcctccctagatttctctccccctgggatagtaacgatgtggactcacacatttattatattaattagaaatcactacctaatataattattctggcatgcacatggtgagtactgaaaatattattgacagaatttctccatttaactgtggtgttaaaaagatttgcatgtctaaaacagccttgattagatattgtttttgacgactctgctcagtgttttactagatgcacattaagcatgaggacttttagcacgtctgaagtaacatctgctctgtctttttgttgctgggttcatggtataattagctctatatttcaccaaatacaattttgctcccatggcggacaaagcagcatgaagaaaacataaataattgcagattagagaaacagaaggcaaagtgggtgtagatggctttgataaaaaagggttaaggagaatagaaggtcaactcattattaagaaaaaaaggaggcagttaaaattagatatggtttattgtaattaaagaaaacacacacagattttccttctaacaatgttttctatttgactaaataatttagtgacttgcaattatgcagtttattttatatttacttagaaaacactttaagaactgtgcatgcttggatacacaaaataaaatttaattattaaaggaaatgttgaaaatatacaggaaattttgtgttgctttccagaatgtaaaacatattttttgatagtgccatatttatagagtcaaattagctcaatgtagccagctggtcaggtatccatagcctgatattctgattttactgtgccttcaattaacaattagtcaatatatttgcatgagccaagggtattcaatgcatactattgaatgtttattaaatttgtaactgtttactgtatgaaaatatctagctcactcatgcctcattgtttagcattacacaaattacataaaagaatattgcataatatatataaaatatgtacaagagtcaaatgttgaaatagcatattctggcaacccataacatgggttattgtactattttaaaatatgctatatgatcagtggttacattagtttcaaaaatgtgaaatgtaattattctcatcttttacttttagactacaaactgtaaaacattttgacctgataatagagtactgacatttactttatttcaatcagaaaaaaagtcctcagaaatctttaaaacaaagtataagtttttgtttttgttttgtttagaaaaaagacgggcagagattttgttcctacaggtgttcctccaatagcacagaataagtaagaatacagaaatgtattctacttcactctatatctgaagcataaaattcatattaactagaacaatacaaggcaaataaaagaacagaaagcaagaaaaagtcataaattactatgtagtgatgcgttgaagacagtttcataaatattataaaaaatattttttccactacatgttttcctgttgaagaaaaagggacgaatatttctgtaatataagagtatatttttcatataaatagcaagtttaaatatattaatcccactgataatatctgggagattttgccatattcctgtgaactccagatgttcttgtccagcttgcttcaggcggagaaagagatcgaagaggtgcaaggacacatgtaaataaaccatttccagaagacaaatgccaccaaagaacactgcgttattcgcctattaattatttggttttcttttatctttgttagatagatagagaataaaaagcaaatcctactttggcacagatatgaatatttaagtggcatttttttttccggaattatggaacctgaattgaaagagaccatatgattgaactagttcttagaatcttctggagagattaaaaaaaaaaataactggagttacaccgaaccaacaaaagtataatctctaagggtgagggcaatgtattgaattttttatttgtttcaggtgattctaatgaaaagtcagttttgagaatgacttaattctagtctaattaccttttgatgattgagtcctctttatatacttttttaaaatataaacttgaaaaccattagttatcacatgtccattataccagtctatctgtggataactttgactgttagaaagaatttatgtaaattatgcataacagccattcacaatgtgagagtcctttaggtgtttgaataaaactgtagtggatccttgatttttattgtgcttattttctggctattttatatataaaatgatttcctggatccttcttttataattatataaatatgcatgtatacttgtatatatgcacatgatatatattataaggatataacatataatcattgtagttataaggacaggtaaatcaaattatatggaaagactttatttagttaaatatatccacctatatctcaggatttgggcatatatagtgtgaaaaactagaaaaactttttaatccaagttttagtccagccagtagtagtggcttacttatgtggccattatttctgaatgaatataacttttgtttatgctttgcagtattttaaagaaaggagccaagaacttgaaagttgtcttgccttgggcaagctactgtctttcgaaggatttgcatctactaattttgatttctaaatctatgatctttctacatcagagtgtctttcctattggttatattgatcaagcatatctgaatattttagttgtatttggtgataaacaattatagttcctctttctgtgagtttcaaataactgattaagacattcagatattgccatatgatttttttggccctattccttaataccagggactatgatttgatactaagactgaaaattatggtaaagacatttattctgctttctcatatcagttattttgtatcttcattattcagaggcatctcacattatatctgtgtcctctaaattatcttatgtgtgtgcgtgtgtgtgtgtgtgtgtgtgtgtgtgtagaaatgtgtttgtgtgtatgaagaggtaatacaaaaaggaaagtctttttatatacatgtaaaaaaaattaacattagcataattagtatgaaatcaatgagagggttattgaccatttcccatgttaataaggttactgattcaaaatagtgtaaatacagaaagtaaggaggtttatcattcaggggaattaaagtcaattttattatgtgcatataaaacaagatacaggtggagagatgtgtattaattgacttttcctgctctacagttccaattcaagaagtggacaatatagctttgagtgtctctcttaaaaccctgaagatggcatataagtaaattagatacaaaacttttgcctgttggttctgttcagaacaagggaagaggatgccatttttctacccctgaaagcccaggaattgtttaacagcatttccattgttcaggttgtataattcataaacctctttaatacctgaattacattacatttaatgaaattttactcctaattcatttgatttagctaaaacttgcctttaattttgggtcagagaatttcagcaattttttctgaagtagtattaaattatttaaaacatgtgaatagtgcagtcccatcattctgttaaaactcattttttagatgaatgctcaaatgtctttttatttatatcatcagcatgaggcttaaaattataataattttatcatggtttgacttattttatctttagtttttatagtaaagttttgtggtttagaaaaatgacatgtttagagctatacccttatataaataagagatttatccaaatataagaagaactctaagacctagacactttaaaaaagttagagctgaccctgatttgagaataaacaaaatataaaaataactagggtaaagttttgctaagattatgctcctttgcaaatgtggaaaatcaccagatttctggtgcccaagagtatctttcccacataattttcaccatcgccgagggagagtctgttgacttgcaagtagaactattaaataggttttctattttgaatatgtgataaatgatagttcaatttgaaagagggctgcaaatataaattttcgaatacagagtggtttaaataggcttttgagtactggcaactcaatcatggcccaattgggcattattttaggggaaaatttatgatgtaaatcatgagtggtttatatacattttctacatcacaaaagagtgtatagaatcaaaaaataagcgtcaggccgggcgcagtggctcacgcctgtaatcccagcactttgggaggctgaggtgggtggatcatggggtcaggagttcgagaccagcctgaccaacatggtgaaaccccgtctctactaaaaatacaaaaattagccgggcgtggtggcgcatggctgtaatcccagctactcaggaggctgaggcagaggaatcgtgtgaacctgtgaggcagaggtggcagtgagctgagattgcgccactgcactccagggtgggcaacagagctagactccatctcaaaaaaaagcatcaataaattttaaattgcaacatttatcaaaatatttatactgtgtcttcagttttagggttttccaggtcccattactgtggtccaatgaaacaaaattatagctagtgcatcttaatataaagggtttaattttatttctctttttttcctatcttatttctgcctattttttttttttttgacagggtcttgctctgttgcccagactggagtggagaggagccctctgggctcactgtaacctctgcctcccaggctcaagcaatcctcccacctcagcctcccatattttttttcctttttggtagaaatgtggtttcaccatgttgcccaggctactctggaactcctgggctcaagcgatatgcccacctcagccttccagagtgctgggactacaggcatgtgccaccctgcccggcctgcctttctttcaacaaaacaattatcctcttgttaataatagggcctccaattttttgagcacttactagggacaagatgctgtattttacttgtgtgactcaacacaatgtaacaggaaggtagggacagtgatgatcatcttttgacctagtagggaactgaggcactgagagaccaaatcaattccccaaggccactgatttgaattctgattggatgccagagtctggagacaaccccagggtgcactgatgagagccccatggtgaaatcacactgagggaggtagagaaggggtttcagtagaggacttttccaacaatgtttgtctttactgggaaataaattgtgtgcatttaagcccttgggccaaatggtaggtactgtataacactactgtgtaaaaacacatgtacagctgttttatttgtttttcatttctattatgtttaaatttaaaaaaattatgtatacttattgtgtacagaatgatgtgttgaaatatgtgtacattgtgcaatggccaagttaagccagcttacgtatgcattaattcacatgtttaacattttcttgttgtaagaacacttaaaatctactcttatagtgacctagtgttattttataatagacaatttgacctcaaataaatgtcatgaggttctagctcagaaaaaccctcaattcacgctacatcacaaaaatcatagcttattataccaattcttagaagtaaaccattgaataaatttgaagtgactggcttgagtgacatttatcacttcaaataccagttttctttcagcttgatttagacttatatttaattaaatcttttggaatggaaattaatattaaatttacatgcaatatatattggccacctgagtcatcttaggctatttgttgcacacttcttttatgccccctccaagtcttcaacctctccttgaaagtcctagctatatacctatttgcccacaaattttgaatataggatttatgcttctataaattcaaattgctgtttgtctgccaaaaatgtaattttcccctcattaacctacatttccagtgttctgttttctgtggagaccttccacacttgcatgagtacactcttcacctacagtgctttgttcgtacctataaagtagcaaatgaagatgtagccctaatacaacatggtgagataatttaactatttgagggttaggctttgtgatgacattgtcttgaattttcataaaacagtaatagtcttccttacattatccatctctttgtttatatgctttctgtaagtcatatatatttctagcacagttattacaagtacaatgtattaaaccataaatatgaacacagtgtatataaaccagacatttctactttgtttccaaaatccccaaagtgtataaatgccatggtatcttttcctctccagtaggctattagcgctttgagggcagaatcatgtcgtctctgtattttccagtatttggagtagtgactcacacggcatgcagtggttactcagtaaatgagttaaatgaataaacagttaatgaataagaatcctgaaaacaagggaatagtaagtaagctattttatattttcaagatacactatttccagtgaaaacctaaaaaatgaagtatgaaataagttcataatttgaggccatctacttatccattttattcttccagaaataaaaaaaaaatacatatatgtgaatgttagtgtccccacctgtggaccctacccttcaaaatggtgattcaagtaggagtttagtatgggacatcactttaaagtctctaaaaaaataagttcttggacctcttaccccaaatctgttaattcttcatttttctcatatcagttattggtaacttcatttttctacttagaaactgcatgtttgtgtccctgcagcattcatgttgaaaccttaatctcaatgtgatagtatttagaggtggggactttgggaagtaataaggttaggagggtagagtcctaatgaatggggtttgtgctctcctaaggagtgggcagagaggatacaaggagatgtttgcagtcggcaactcagaagagtttcctcttagaacctgacatattggcaccataatgtcagacttccagcttccagaattgtgagaaatctatatttgttgtttaagccaacaagtctttgggaatttttttatagcagtctgaacaaactaagacacttgttcatgcctaaaaccttggaaccatctctgattcttccctctgttatacatctaacatatccacagatccacctacttctttccttctccattatcacctgctggaattatcgtgaaagtctcagaactcagttccaagcttcctcccttctttttgatggtagccagagtagtctagttaaatacaaatgtcaaatcaggtagtttctctgcctataattatcccaaggcttcctatttcataatcagtgaaataatacaagtccttccaataacctacaatcccttccacgattgggctcctggattcttctctactctgattccctttccttcatctctcaccaaaactcacctccagccaaacagggctccttaacattgctctaatatcccaggaatgcatctgccttagagtctatgcattgtccagccatcttcttgagatcctcttcatccagagatccgtacatatattttgttctctcacctccttcgaatgctaccttcttattaaggatgtttatacataaccctattttagattgcaacctgtctcctcaatatgtagatactccctatcctccttccctgttttatttttctccacagcccttaacacaatctgatatgccatgtattttaactagtatataattactagaatgtcagccttgtgaggcctgggactttgttgtccactttgctcattgctaatcctagtaactagaacagtgcctacaactaatatttgttgaaagaatgaattaagagacatatgttttgaggcacagaaacatatgaaaaaataatactgcaaaacagattcaaccaagagaactaggggccggtttgttgatatttaacaaaaacattaatgtttccagaaagacctaaggagaaaaaaagtcctcaaaaatctttgcactgaaaaagtgatgatgaaacagttaaaacatttattttctaaatgtgacatgctctaggagctacacatcacttcagctcatgtttacacattatgttactataactgcttaaaatgtagggatttttaattgaattttatggctggtctacattgttgacagtaatttttatgttatagcttatgagtttagtcatagaaggatagagagaaatttccattgatgtaataaaatatctataaaagtaaaatggtgtttccttagtaggtagttatatctctctaaatctctgagcatgcaattataaataaatgcattttgagagtgattattttgtaaattaaatagctttctttaaacattaagaattaatgatatattcctagatttgttacctaaagtatatattttacacaatttccttttaaaaatacctttgtaatatatttacagatagaatcccaagactttctaaaaatttttttatattagagatgtccatattcaagtagattattttaatacacagcatttgaaaataagttcaatgtttatgtctttactaattagattttatttaaaacaccaagttatgaaaatatgcattttatgtttttctatattatgttaatatcttttaactagtttttaaaatggtcaatataggtttttaattggaaattatattgttaacctatacttatcataatcaactaattgattgaaatatttaagattttatttatttaggaacatttagaattttaaattttcagaaaatatacttattagtcaaattcaatatgaaccaaaacttcacttcttcattcttcttcatagttattaatagtcactcaagatattttacttacttcctcatgggaaatgatgatgaaaaatgggaatgttccattgttattgacctttaaaatctcttaagttaaggattatgaatacttttagctcaaagcatacataatcttgctattttctttttcttctacatattcccactcaacagcattttcttgaattttaaaatggataacattcatttgacattttgcagtctaaaaattaaattttcatgcttgctttgaatacatctgggaaactagaaatgaaattttgatagaaataaaaatgccactgggagtattattgattacccagaatgtgtggctttcatttaccagttaaaacatattagctaagtcatctggaaatgggttggcatctattctttcaatcattaatataatagataatttagatccattgtctgtaaaagctttcagatgatcataaaatgttagaacataaaagatctgattaactttctagaatctagacaattggaacatcattttcagagagtattaatatctccagattataagacaagcagtcacaaaacattggtttgaacatttataccatcttcgataaaaggatgttcctctctttcttgttaactgctaacttaaaaataataaaattaaaaataaatccccagtgccttttacattgtcccagctcaattcctggctttagtcaatctagcattctatttaaaactctctaattcttcctatttttctgtggtgaggtgctcttatgcactacttttattctcgtgtcaaaatccgtactctgaggcagctgcctaacaattacatgtgcttttacattctcatattttcctaaaattgaaaccattatataaatgttaattatgatttattgcccttatttggaatgccagtttactgaatgcctactctggaccatactgggttaagtctaggcaattcaaagactgaagatgaatactttacctttaagaaatttaaggaaactattggaggaagattgctttttctcttgtgaaaattgagattgtcacattctacttggatttccagaatttatcaattttaatatcagtttcaaattgtattcccttttacttgtaatgctcatactgtattagctatttttcggtattgaaatctgctcccctcaaatcataatatttgtaaagaatggtcataatttcctttctataattattataagttccaaattggcatggtaaattctccttttcttcttttttcttttctttttttcttttctttttttttttttttttttttttgagatagagtcttgctatgtctcccaggctagagagcagtggcacggttatgactcaatgcaacctcgacctcctgggctcaaatgatcctcccacctcaatacctcaagtagctgggaccacgggtggatgtcaccacgcccagctagcagttttaattattttttgttgcccagcctggtcttgaactcctgggcttaggtgattctcccaccttggcctccaaaaatattgagattacaggcatgagccatggcactcagcccctaattctcctttttaaaattttcaaagtacttctttctcctcctcatgccatttatatagcaggtgctttgtttatactcatcatctaatctatttgataatgtggcccttctctttgattgttgctatattacacagaatttttaagactgcaaaggtaatatggacagccacacctaacttttactaatttctgtagtttgtctgctacctcacaatgaataataagtagttattccctgtgaggtaaaattaactctagagaaaaagctccctttttttgttttaactagcttttttttggattctgttgtttggcatggcagtgatacaatggctttgtgtaagaaacgttaagagtaactttttaatcttgttcttattttctgaagtcatactagggcagtatttgatttagtaaattaatgtaacctggatgttctaaataccttaaaatgtcatcagatactacagtatttcttaaagtgtggttccaggtcccctggaagggagggttcccaaaatacttccagggagtccaagaagtcacatctcatttcataataatactaatatattatttacttctcttaaactgtcattccctcatgagtatacagttgtttgtcagaggctacatgactcatttcatcacaacagggtgaatgcagaagtggatgtcaaaatctaagtgacttctttcaagccatttagtaaagagttttgcaaaagtgtaaaacaaaatgttttgcttcttaccatatttttgcatatatatttaagattttttaacagtttttcctttctaatgtggtaactatttataatccatgtgtataaagaagtcctgaaaccaagatgtttgaaaatcactgatatgtagatctatggattataaaaaaagctcatgattttttagaatctatattagaaatcctcatgtatttacagtgagttgtattctagagttttctttaaaattgcttatagtcagtggaagtagtgtgaaggagaataaaatagtctgaaatgaaaaactgggaaattgaggccggtcgcaacagctcatgcctgtaatcctagcatgttgggaggctaaggcaggtggatcacttgagatcaggagtttgagacctgcctggccaacatggagaaacatcatttctactaaaaatacaaaaattagctgggaacagtggtgcatggctgtaatcccagctacttgggaggtagaggagggagaatagcttgaacctgggaggcagaggctgcagtgacctgagatggcgcccctgcactcccgcctggttgacagccagactctatctcaaaaaaaaaaaaaaaaaaaaaaaagaaagagagagacagagacagagagagaaaaagaaaagaaaaactgggaaattgtagatgactttttaagcaatatgatgctctcaggaaggcggacaatgaagatgaactaaaagttattttcaaaatctctgttgatttttaaattattgttagataatatcctatttttcccccattcttataattaaaatgtcagtcctagcaggaatatttactaaacttttcttatgcatctcattcattcaactaacattttgtaagggacatctctgtgtaaggctttctagtctatggctaattccaaagtgaatatgaaaatgtatccttcacaactttcattcaaactgtataacaaatggcagatctgagattcaagcctatagtacaaccagtgaggccagattgtgtatttatccatcaaattttaattcttcagaattgagaaatttggttcagtaaacacatgttgaatatgcaaagaattcccatctaccttgtcaaagcaaggctttcctttattaagatatgtgtactctccaaataatttaaaacacaatataagtatgacttttgtggtaaactataagaatggttttcctttgaccctcttcttagattcatgatatagagacttggtttaattatattaatgattttttgtgagcttatataacaggttttctttttcttactgatatgagatgtttatagtgcgctgtgtggcttgtgaacccaagaatgctttatgtttttaatctgaagaacagccgtaatgttttctttatattaattttcacctctttagatttccatagaggacatttcaaagatttatgtttagcataaacacttcttttagttaattgtagaagtttaacactgactatatttacagccccgtaggtatagtttaaaatgtacatattaaacagaattgctctctggcatggtttaataaaatgatctgtgttattaattatacttttagcatgaatgtgctgtcatttactgaaatgtaaaaaaggaaaatcagtgataatgatgataatataaaacatcaattatattaagttagcaaattttgttcttttttcagtatttgatgatttatgcttaatgaggcaaggggttgaagtttatttcaatatgatgaaatttctagatttataattagtattatactcatatcaggtctttttaggtgaatcaaaacgtcaatatcaatgaatttaaagctatatccccaaactgaattaaggagttgtgtaaccatgttcacatttttaatactgattagcttcactcctagagtaagatactgacttacggtctacaaaatgagtatataatttgacttaatgaatatgagatcatcatttatttactatgtttatcaaaataaaattttgtagtttaaaaatacaggctaccaaaagctgaaaagaaataatctctgtggtatttaaaactacaaaaataataattatcactatttttcaattaatatttctccttttcttaatcagttttagggatacttaaagcatagttcgaaattagagttgacagtttcaaatacaaaccaaccaacagtgtaataaaatcaatacttacatttcccttgaggccactatttactgtttgctgcaccatttccttaatggaatggcagttatgtttgcagaaaccttctaagtaccattttatgttttaactaaaagcagctttcttgaagaagtatgataaagaaatttttgagttactattaaaaattgtcataaccagttagtggttcgtatgagtgcagagaaggcagccttcctttttattttatttttttgataaacactatcgcatttcatagggagtgatattttgctaataatggtaatatgtcttttatgtcttgattatgatggacattgacttaatatttaaacatctcgctatatttaaacaacttgctccatttaaataaacacatttacagttactaggttacatttcatttatggattgcttttggcagataactatagaaaaaattaaagaaagggaggaaaatagccatttatttatcttcacacagtaaaattattgtcaaaatgtgattgacaaagtgatttactaatctcatttaatggcttagtgtttctattgtaagaattggtcagtaatttcactttttgttcattattttgtgttgttttttacaaaaaattgtttctgaaaaaatgacttcagaattacaatagactatcatttgtctgttccttgttttactgtactttatattgcatttgaaattgtctaatatgatattcttatgtgaatgctttaggtagatttgcatttttgaggatttaatcaaagttaaaaaatcaagttatttccatatttgcttttggttttgtattcaagataataacagcataagaattatttaaaatgaaagggtactttttacctcccagaggagtttatgtgtggtcaaactttgtttttattagtaattgtacaaactaaagtagagaagttgtgtgaacagaattcctggactttttagaagacacattttgaaacaggatattgaaaacaaagtccattggccaactcaagtctttttacatgatgatgtcagcaactatgtcctgtgataaagctgcagtattttcatgacaaagaaaaattcatatccacatctttaataaatggaggaaaaaaagcgttgttagtagattcatccgttcccatctaaacctttgtagcttctctcaaactgtaaatattgagagtaagatcagaataaatgtggtgttgcatcaaaattaatcgctaaagttattacttacggtgtcacatgtattccacattcaggcttttcacagaaagctttgaagagccctacaggaccaaccgaatgtaattgatacagaatcattgctacacaacagctgcagtaacaaggtgctgcagcttttactttaatctacctttctttctgagagtttattatgtttttgaatttattcttttgtagatctgggagctatcttttttatggaaattaatctttttagaagatttgtactctctttttcaaacactaatacattcattcaagtatcctattattcagatccagctggcttttatctggtgatatttacttcaaaaagccaagttaaatggtatcatagattaattctcagggcacagaaaagctttcttagagtaaaacatgatttggtaattacttgaaatatcataaaaaatcacagaaaatgtcaaaaatgtgttgtataatccatcataataagaaacttcaaaaagttgtttcactgaagatgtggtattccaagtccatcataagtttttatttcagtcaaatattatataacgtataagtttgtttgaggttttaacaaactatatcatgaattttagttttctgttgtttggtcacacaaagcagtgaaacttcaaaaggggcattatccactgctgtctcttacataaatcaaactggaaataagacacattttacaattcaatttaagatcccactgagacaataatgttgcaagctgtgcattttgcaaagtaatatagtaatgtctagtttgcatttttgaaaaaccaaattaatcacactttattgaatacgttggagcaaacctaaaattcatctattattaaaaacttgtgcaacaaacacaaactatattttatacataaaggacaaactcatttattcattaggataaaacacttggagtttgcattttgtaactatggaaagaaatgacatttgctattggggcttttttgaatttttaaaagcagtctatgtgtagcgacctgcttgaaactttattttagcatgttaaattgtaccaggttttaagctttccagataaaaatagaaatttaaccgaaaaactttgggctattaaaacaaaaatcattaaagtaagtgatataatgtgaagggacaactcatacaaatgaaaataatcacattgggtattattttacatgtgagaaacctataataatatgatgatttgatggctttgatgaggaagagaaaactcttcctgggcagaatgaaggctcatcatgctatttgattttttcaggctgaagataataagtactttctgcatgtatatatttttaggtatgcaattccctatagtattagatataaattattgtggtatcttttggaaattattgcctacacgatatattatatattgtcatttttgagaggtcagtattgaagaaagctggtgaatataagaattgtgaatagtgaagaatagtaataaatagtgtgtaatactgtttcaatgtcagagtattacactgttttcctatctgctgatgtgtataatattctgtttaataacagttatttgaagtgccgtgtgatatacactttgcaccaatagaaattgcaatattaaagcatattccccagatttaatttttctttaaaaaagattgaagcaaccttgttacatttcataaaccttactatttaatcctgaatttgggaggaatattccctttttagcatctccaactgtgtcactcagggagggtctaaaagttatctgttaacctgaatctaccaagtaccctcttgcttttctaataagaactccacattgttgactcagttattggtgagctggtaccccctgtcaagaaagggtaaattatatccctgtatgtgaaaccttccaaacatgatacagatagttttttcttaattaaaaaaatattaactgcagtataaaaggaactacagccagtaggtttagatatggagtagagtatgcagtaaccacttgtcctcacccaacataattgttttgtcatggctggctctgaaagccaatttgttcttcagtcatcttcttagaaaactctaatgatagagaacacaagatttttttttctattttatcaattttccagtggcatgaaatatgagattcaggaatcctgccctggtcatatcaatgtcaatgtggtggatgacagaactcaggatgattattcctgatgatgagtttcttctcctccttctgactatctgatacatcactttaatcatatctctcctctgcctaagatgatgaccaaactcatcatcctgacatctgagaactttcataatctggtcctagcctacctaattccttctgacttctcagactttcctaatatgtgttctctcctctagtcaattgaggtacccagctgtcatccagacgcaccgtttatgtatgtcttcgcctcactgcatggcccaggcaactctctgaactgggtgtgtgctgttgtgccgtggagaggacatggggccaaaaggcctgcaaacatcttccaaattcagctctttttccaaaaggctgtgcgaccttaagcacttaatttaatcactctgaacctcagcttcctttgctgtaaaatgagggtattagactttatggtgccatcctcagcaaagtctttaccttattgcatcattttgaaatatattttttttccaacacacatgcttacatgtgctcaaatacacacatgcacatgagaaaattctttttcatccttccataattggcatataatattactttatttatttgtttattttttcaacctccctgtagttttaatataaactccatgaggatataaagtttcatctgctttgtccattgctatctccccagtacttacaacagtgcctggcacaaaatagatgttcggtatatgctaaaaaaatgaatgaacaaatgatttcaatgtctattttgttctctaatattctatgattcaaatatatacagaaaaataaactgtaggttgtattacaaagtttaaatgcaatttcttgctccttggcctgtacaccatagcatgctggatatatatatatatttaaattatgttttctgctctatttctttgtttgctagtttatatgactgcataataatcttagtctgatcgtttctgttgtcttgcctccctaagatttccaatatgcagggttaacttaattttggcataaataagaacataaattgtttttcaaagccatcttatttctcatctaaaatttaaaattttattaatattaacctgaataaatgcacataattaaatgattttcaaaaaatattttttttgaaatattttttcaacagttcagtagagaactgtttcaatagttcaaacagttcagtagagatttgacacagttcaaaaattaagccaagttctattcttaaagtcttaatacttttgtgagttaattagatttaaaatggataaatatatttaaaacacccatcatagtaatttgcacacacaagtattaaaagacaagtcgtctttccattattgtttattggtatgtccataacacaattatgtttcttgtgaaatggcttaaagatacttacactaagcgtaaagtatactccagatgtttctttctgaaaagcaactcttcataggaagctcacagagcaaaatttcaaaatcaaagaagaaaacagtttttacacagatcattttaactaaaggaagtccttaggtatttaattcgttttgaaaaattttgttttagtctagtagctgaagtcttaagtggttgtttcatataagttattttaattaagagcaacatttgttgtaagtttaacaaggtgcatttacccaggcgacctcaagtcttaggccaggcttatctaaatgagagcatctgtatatgatgatcttaatattctctgatgtaatgatgtgagagaatgtgtgtggtagaacaggcaaaaagtaggaagtgtgcaatattttaacattggaggaaatattaaaattatttaagacagtttgagattacaaagaaaataacagattatagtaagtattttacaatggagaatattttttagaatcagataacgattcattgttaattaaaggccccctggatgatgatgattcttattattatttgagacagggtcttgctcagtcacccaggctggaatgcagcggcatggtcatggctcactgcagcctctgcctcccaggctcaagcaacgctcctgcctcccaagtagctgggactacagatgtataccaccatgtccggctaatttttgtattttttgtagagacggtttccccatgttgcccaggctgggcttgaactcctgagttcaggtgatctgcctacctctgcctcccaaagtgctgggattacagatgtaagccactgtgcctgaccatggagatacttatttttaataggtagatttctctcacactgaaagtatttaaaattcagtagctttattactattatttctagataacgataatttgaatacatgttatttttgtaagttgaggattttaaaaaatcctatttctttgaccattttagaaaagatgccatatttcatcattcattatttattttttaccaaggcatgtaccttcttaatattgatgttgggaaaaatttttgcaaaaaagaaacaaaaatgaatgtgactgatttagctaaatgccatcctgagttgttgtcttttctaaacttaaacctgtgtttagcactcgagtcagacattgaatcattgtgtaactttacctaggttcatacccccttatattcttcattggtcacattatggttacaataattaaattagatcatttttaaaataaaaagaataaaaatgtttaaattttactttatatttgcctatgaagattgatattttgagaaaataaatccttatttagaaacatagtttttaaccctctttcttattctaactctcattgtcatggcaatctacagaagagttttataaccatttattcttgggataaaaatgagtgcttgtattttccccaaattggagtataaaggtaaaaataaaattatctgtattgctgctgatcctaagtattctttccattgccagcagccaaaattttattggtccttttgaccttgaaaacctcctcttctgaatgcctatgaaaaactgatgaaaagtgcttcgaatagaatgtctttactatgtataatagaagctatggtcagaatgatttggtttcatataaacagtagctttcaacaagtctgccatctgcatgtaatctaccctataatataatattatttcaatggtccttcaaatatgctgaattcttttctgttatatgcagtacctctatttaaaggcagccatctccatgtttttaagatgaactttgtaattactggatatcctaactgattatcatattacaagttggactaatggcacattttgaaattattcttagttgtgtctatttggttttgtctttctttaggctgtctaccttaaatagtagttaggattgttaaatctttaaattcaatcataatgtgcattcattcattgttaattgagggcctaagatatgtcaggcattcatgtattcgtattgattatcttattaaaaagaatattttagcttagaagtaagtggagaaacttgaatattataaaaatgcattaatacaatcatttgtgctaagaatttattataatctgtgtaacttgtattaaactataggagtcacataccaatatttgcttattcttgctcagctcttcaggattaaaacattatgcaatttggtttatttgagacttattctatggtttatagtagaaatacacttttggtagcaatacctttattctttccatatctgcttaaagcatcatggcttaatctactatgtacaaattaatgacttccaaatcttcctcactgggcatctccttttcttccaaatttcagtcccatatttataattccctgttgtcaatctctgcatgactattaccgaaacatctcatattcaaccagtccaatattgaactgaattttatttatcgtaaaatctgatctttatatgggtgataaaaagcttggattgtgaattcagagttaggataatgaatataaaagcttaacaaaatgcccaacacattttaagtacatgatatatactagatgctatcatcatcattattgcctccttaataatgccactatacaacaattgttaatctagatgctgaattcatctttcatattttactcactttatctccatttatatctcaatagttactaagttccattaagcttatttccaaaatgttaaacatattaccattctttatcttctctatctttaattacagttaagaataataattagggctgggcgcggtggctcatgcccattatcccagcactttgggaagacgaggcggcagatcacgaggtcaggacttcgagaccagcctggcattgtgaaagcccgtctctactaaaatgcaaaaattagctgggcatggtggcgtgtgctgtagtctcgctactctggaggctgggcagaagaatcgcttgaacccaggaggcagaggttgcagtgagctgagattgcaccactgctctccagcctgggtaatagtgagattctgtataaaaaataataataacaataataattaggcaaatacatgttattatatgtgcatgtgcctctcctgcatatcataagctgctccataacaaaggctgtatctgaacgcttttattgccacaatgatacttaccagatgtaaatgtgagaattggtctggatttgaagctctcagctcaaaaactgattgaaagttagtcttaccttatttatttctgtggatacaatgatgagagaaaaaaaaaaaaagacacaggcttgaccacgtggaacttacattaagacaaacttttaaaatatttttcttaataacaatgggaaaaaaatgaagacccctaatcaggggagtgacagtgtaagatttgtaattaaaagtagtggtcctaaatttgattacagcagctgaggtaaaaacagacaaaatagagatgaataatagagatgaaatcaataggacatgaaaaaggagttgggcgctgctggtgcacaggaagagatgagcagataaagtggattcctaggttcctggcttataaaactcgccggtgatgtccttctttgaggctaaccaggtttaggaaggagataaattaatacttaaatccatacatataaaatatcaagacaattgccaaaacataccatctcacttgtgaaggttttatgctttttggaaaattcaatagcaattttcctcaagtgggaaaaatgttttcaatttcaacacaaataattgaaaactgataacattgtataaaaccatgaaaattaaaacttatttcaccttgccatgggcaacatttgtacatgagcataaaaacattaataatatatactttgacattgattaccccactaacaatctataaaatataactcaccattttatttaatgtgattataaatccatagggaaattacaatatccttagagaaagaatttctagttcattggtttacctaacagaagaatagtatggtgaggtaaagttagaaaaagtagaaattcattaacatggcaataagaaaggctaaaagatggaaagcaaaattagcatagatactttataccaaactgctttattttgaagaactgtatgaataagttttagatagcaaagtgtgtatgaacattgtgtggtcatttctacattgtcctttatctgtaatcaaattatacttaagttgtagaaattaaccagcttttttcagtctcatttccactgactagcaacatttggctcttgcttacaatcagcttatagtctgtatttacaagacacccaaatatgtagtcaatacaaatcaatctggctactaattttttcttatacaaaaatctatgtaactatttacccagtctgcatttctttgttttaccttggtgtgtggatctattttccctggttaacacttacagcatggtgctaatgagtccaaagaaaacaatggcatcaaaaaaccagtgttttctgatatagttatctctctcttctgcacatatagtattttaccttttatctttataattatgaccctacttcttttagtttgagttgcatcaaaactttctgaaatttactacgacataaggaaaaatacatgaagcattgttatttatatatagaaattcatttaaataaattttatgagttccaaaatgaaagctatttaaaattgaaaccattgtctattttcagcttcctaatgctatttttgtttttcataattatccagtttctcaggataaagaagccattgtttttagtaatgtctgcctgttcattaagtatcgtttcatcttacattagtcacttggatatcagatctgattttacggtttgtttcccgttctctttagttcaataatcattggccgtagtaaagaatattcagccaaaatttaaaaataagcagttctagtttccattaatttgtgtgtgctttgtacaacttcacttattgttactttcagcaccattgtggagtatatagggcaataccaatatcttaagtaggtgaagaaatttagaattaacaaagttttgatgagtccaagaacactaatagcatcagtattatgttataaacaatgcatacaaaataaatatatcaaaacagctctgcattcaaaagaaaacatcataggtaagataaaagtcccctggtatggcaagagtttcacattcctaattaactatatctgacattccagtaacacagggtaagatttagttagtgatagataactaaagaaaaatatctaattatttatgggaaagtaacatattttcctaaatgatatatttataggtaatggggcagttagaatttataacaacattatttttctctcaagaaaaaaataaattgatgtaagaatattaagccaagcagaattggttacatgaaagacaaccagttctttttttacccagaacctccaaatcaaacatgataaatgtgctgacctactctgcggacattattttgcaataccagttaggaggcacttgtggcattttctttgctaaaccactacacttaaaacaggaacattttaaactgtgtccctaattaattatatccctagaagatttcttcttttctcattttagtagtgtgataaagtcaaaccaaagcatcaggagatttcagtgtttttatatcctaaagtagatcaactgggattaaatagttattcaaaagaatacctaaagactatattacaataactttcatgaaaggactgtttccgcaactcatgcaaaatagtagcattactgctgacgttttatatcatttttttaatagagtgaacttaatccactaaaagataataacttgtttattctctcacctacctctgaagtaacagctgaacatctgtagcacctgtgactaatatttacttttatttagaagttttgttttcgttgttaagatggagttgacgtctttctaagtggtctccaatggtatggagtaaatgcctgctcttgccgtcattttcattgtaaacaaatcttgacaatgtcaggttcccgtcacaatctatcagtgtcactcaataagcagtggtgtgaccgttagtccctttgcgatttgcctcctttatcagggtcagcctgtgggaaaatcttaacaaatagttacatgtcacctaggtataaatgatagtaatacagtagtcaaatatatttttactattttaatgcaagtaatttaaaaggcatttatattttacagatcactttagttttgtgtttattttatgtgtcttctatctaaaatgcatagaaatactgtggacttctctttgggaacctgtttctcgttggatatatttaggaatgaaatgaacaaatacatgaatatgtataattatttggactaagactataattggtgccgtgcgtacacacactcaaaattgttattgtgtttttagtagagaaactaagaatatctttgtccaaaacatttttcattccctttcctacctaaaaattgtgcttccctttatttctgtttattctttccctttatttcagtttatttacaagaaccagttactaaaatttgatttataatatagccatatttgttattcattttcttgtgtatgtttatgtaacaggatattaaatacaatttttcctgtggtctccaacaagaacaaaaggtgtcaggtacccctcattttaaagaaagtaaaaaacaattgtgcttattatagcaactgaatcagcattgctgtcttaactatcactccagactccatgaacaaccaccttcttcctttctaagaatggaccacactcatttatgaacactcatttataaaatgggatttgaagagatcattctagtgaaaggacagcaactgacaggtatggctgtggtttagtaattcctctttgggcatgcttcctcactgagaaggtcaagggaggaaaattccaacagaattactcaaggattgcggatgtttccacctcgtttggtagctagatttctgcttaagtgtgaactgctgattgggagcaggggttggaggtggtggtaaagaactgaggagaagggagcaggctggagaaagtgggcatcagaacaagaggacttacaccagcaggaggaccttagtatcaagaggcaatgggagtttaaggagcttagacgatcatgaagctggaggagagtctactgtgagggacttgtgcagttaggaagttcctcagtaaggattcccttgaaggatcagacattaccaccatggaaatgtttagatttaggcctttaccacttggaagatgtcaatggcctaaaggagtagccacagaagttgtggtgcaggggaaatttaagcaggaaccatttaagcaagagacatttatcttattacccagaagaaggagaagaggaagacaggatggttgaaaagctgagctagcttctgtcttctagatacctagactctagaaatggctaatgctagtggggatggggaagcagagatgacagttaactagagtggatttattatactcaaaatctgctcaaggctcttaagggacagaatagggaaccttgacaaagcttttttgaaggcagtaattagaggaaaacgaaaaccattttatatttgtaacccatcatttctgactattcaataatctggtgcccttagagtagagatggctttcacaatttagggatatatttctgcatttaaaacctggtccatcttaaaagatgtatcataaaatgcaataaaaatatcaagtgagggtgagccaaggaaaatagtctgagcccatgaagactaagacattgcatcaaacttatttttcagaagctttgttttaatgttgtaatggggaggcactaagcggggagaggacctcccacacctactccttacatatttgaattttagttacactaaatcttgaaataaccttgcttgtcccatcttttacacagaagaaaatctaaacacacacagtcactctttatatataaattccatatatttaaatatgtagttattagtatattcttaatagcagttaagtcagttttttctgtttctgtcttcccctgccaaatgttagaaatttcttatatattgaatctgctgctgtttcttgcagtcttaatagtaaatatgaattttaaaggtatttatgtgtgtatatatgtttgtgtgttaagcatagtgcatatatactggtttatatcgtgctaatatattggcttaaaataaaattgtgaaaatatgcacttaataactgtgggcaggtcttgttctgaagtggcctattttcaattcttatttattcatgctaatagaggaaaaggatgttataaataatgcaaaaatcacttacagctgacttggttacatattgtatatttttcatcagacttagtttcttaattgtttgctctatttattacccaaatgagctaacatcatgagtatttaacaaatgatgattggcggagatggctagaagcattctatgtagtgagaaaatctaatatagtattagaaacttactagagaaaattcacatatgaatgcttgatatttacctgtgcacaagggactgatatctgtgacgcaaaaacagatgtgaaaatgggtagtgttttatctgtagttttcagagtgatttaatcagaattttaagataatattttgtaccttaataatgtgaaaaatagagttattgtgcatctctactgatatgagtgaaatttaaatatatttgcagaaataactatttcccatttatttatttatcgtggcagtaaggacttcaataaaagaggaaattagtttaagtgaacagaaaaaagtagattatagctgtaaatggagctcaaactgaatccaaaataatgaatgtatatttttccactccatattttagttaattatcttcaaatatgcactctactatgaaaatgtaatcgttacatttgttgaagattttaaatgaagtataaaatatagagaaaattacttattatttctaaatttccagggcaatttctatattaaaataatatttattccaaagcatgatttctatatcccgatagtcagttttaactgataacatacaaggtaaaatcaatgctgaatcataacatttgaccaaatcaaatcccacagattttgtgaattaagcctataataaaaaaattgcatgtactttgataaaggcaatgtaaagagcagatgtttaaaatgtgttataatcataatctcttgatatcatacatttgaaaaattcatctatttatagtgcttgcgtgtttgactagtacctagggataagtgtcaaaaaagttatgagaacagaagtaaggtgtataaatttgtgaatatgaaaagaacttttatatcacagtgtaggagcaagctggagaaatttcttttatgtaagtcatttctgtatgaagctataaacttttttttaaaccaaaagctgtcatggtttcttgtaaaataataaagataataaagatatccattttaattgattcttttcattgtttaataaaattgctttgtttgattgctgaagaatttgaattgagttttcattacccacttctgaacactttactctaagatccagacagtattgagctaattagtttgaatttatattgaaccttaactgtcttcatgaagtaaatggaaaaaaatcatggcagtaactaagtattcttcattaaaaactatgtcgtagagattttacaatgaggcttttagcagagctaaagcattaaattggagttttaccaactttgttgtttctatgcatattatatgaaaatatggtttctttttttaagaaataaaaaagtcatgagctgatagggatattacagaaatttcctctaagtggatagtttgtattttcaacagattcagttaaggaataaattaatgttaaattaatttaatttgggagcacatctaaattgaaatgatttataaacaccttccaaggagtgttctaataaggtatttcatgatctttttaaatctaaggcattgctaccaatattgaaatgcaagccctcagttgagtggcattgacatggagacataatgtatgtttctctttatttgaaaacaagtgatgtatttattcacacacacatgcatgcatatttaatttttgctttggcattatattctataaagtgatcttttgtgttctctgtacaatgtctaaccaagctggacgtttaatggcttcattttttggatttgctgtgtaatgaagttaggcactttatgtgatggctaggatgtcatttcatgcaagaataactttgcattctataaatattagtgtgtttcagttccaaggagtaattaattatctggttaatataatagagaccatttcatattaagctggatagccgaacagtattagactccaccactaggttaaatgttgccggaatatatatttttttaattttgagatcctatacaagaaatagaaaatcaaaaagaatgtgcagcttaggggaaatttacttacctcggcttatttccctagaaatcagttttccaactccaaatgtgatacattttttaaaaaactcattttaagttagtcattggaagatttggaataatattatatccaagtaatttatattcattccccacaggcagcagtgatggttcctgggataaggaaacactgccctcttccccatcccagggacctcaggcctctataacccacccccgcatgcctggagcacgtagccttccacttagtcatcctctcaaccatcttcagcagagccaccttctgccaaatggtacgatggcattctttagtattaaaaatcatagttttttttaaattgtatttatcagttggcaaaataggacataataaagagatatactatatttacatagctaattgggataagttaaagaaaaccctagtattttaagcaagattcagactgattataggaataatatagcaaagaattgaccatttgtattaaacacaggataagttaggaaatgataaaccagggcaccaaaccagatagctgtaagcctggttttccctgagtagtaagtgaaatttttgcatatgaagaggaaaaatattgtttctttgactaccattattagaaaacttttgactgtttcaatttttaatgatttatgtcctccagagcaatgatgatatatgtgcattttttataggactggaacttccttttatgatgatgccccaccctctaattcctgtcagcctacctccagcatctgtcaccatggcaatgagccagatgaaccacctcagcaccattgcaaatatggcagcagcagcacaagttcagagtcccccatccagagttgagacatcagttattaaggtaattctttttttatacaattattttggcatgttcatcttaagccaccatcccttaatccatttttcttattccataagtacatctgaactctaaaaagctaagtgatagtaaatagactattaaaaaaaatcacttgtagcaaatggccccaggggcacattacttaggcaggctagggttgctttaaattctctatatatctattaagatagagaaaaacataggacattaaatgttatagttcaaattgtgtgtgttcttacataggtagttgtgtgtatgcgtgtgtggtgttatgagcatttatgtgtggagaatcagaagaccagaagggataagttttgccacttcctagctctgtcaccttagacatgtaattcaatcttcctgattctagtaaatatctaataaaggcataatccagtgtggattatgttgtaaaaactaaatgaagtaataaaattggaagtttccataaattcaaaaatacactaaattaaaggtaacattattgttatataaacttcatatgtgcatatatacacaattccgtctcctctatccctgtgtatctgtgtgtgtatgtttgtgcatcgtatgtgttatatatgtaaatatgttttactttcatattattttaaaatgtgtacttaaatcaaaatattttaactgcgttgtctggctaaggagtaagaaataacaaaaaattaagaatagattattaatttttaaactaagtacaagatattttatgctgcatgatcattatttgacattacaattatcccatttttctgaatacaatacacttaaatttagggtatcctctggagcacatcttatataaacggccctgttcagatcacaaggtcagaagatcgagaccatcctggctaacatggtgaaaccccgtatctatcaaaaatacaaaaaattagccaggcgtggtggcgggcgcctgtagtcccagctactcggaagcctgaggcaggagaatggcgtgaacccaggaggcggagcttgcattgagctgagatcgtgccactgcactccagcctgggtgacacagtgagactccgtctcaaagaaaaaaaaaaaaaaaaaaaggccctgttactacttacatacaatgtggagtaacatacaaataggaattgttcttatattaatggctctaaaaacaaagatgtatcccagatgctttggtcattttctgtagtatcaataccagaggaaaaaataaccaaaagtctcacagaagacctggatcaactactcaaagatcaccacctcagagagcgccagtgagtgccacattgttatcagccaaggaactgataaaaagacctttgaaaactcttctctaagagggatattgttaccagattattcaataagcaagatatcaccgtattgttaaatttatgatgatgttaggtaataggtattattgagaattcagcactctgattgcctcactcattaaagttatctagaagaggagtttggcggagggaaaaacccatttaagtcttcccatcattgtagtcaatggctactttaagcaaatattacaaggtactaagtattaatgtatacgatgtgattattctcattaaaaaaatctggttgtgattactataaagaatcatctcataatattaattatgtaatttttacttttaaaactggtaactaaaatctctcatttaggtaagatttacattaataaataaggcaaacatattacagaagagcagcttttagcagtttaaagtcataatgggtgtctaaattatggcctgtagctaatatttgcatgagggatggcttacatattcctgcatcaaaaagcctttatttatatcaggatacttgatttattttattttgcaatatacacatattttaaaaaatagttgtgctacttgttaattagaatacttaggggatctccttttaatacatacttggttgtcagagtttagataagtaggaggaagaagttgagtttcctctggaagaagtctatagaaaataattcaggactcaatgattgggaagtcagaaacattcctgtgttttcctagattaagtttaggaatggaaaggagggggatatatggagaaaggaagaaaatacacaaaaagagaagaaagtgaggtcgttttatgttttaagatatgtgccaacacctactaagtcatagagatatctcacttcttctcctgttgcaaatattttcagaaacttggttacatgcagattaaagggagttgtggattttgaaagtgttgatgtaaatggtaatagtagcagccaaatagggaacaatggctctaattgagaatgattacaaaaagtaaaatctgatagtttttattgccaacatcaaagtgaagttcaattggctgttgtggaagggctgaaaggcccattttttatcatggtgcccttattattttgtgagacaggccatttgtatagcttcgaatttgacactgacaggtaaagattattgaaagtaaacacattttaagaaaggcatgagacgattctaagcagttatagatgcttaaagacatccacataacctgataaaaatcaagtgagtgtcctcagagaataagggtgaggaataggtcctccaagaagttctaagtattagagaggagaagttaacaaatcaacctgtctaaatgtatatattggttgactgtatagaacaagaagagtttataaactcacctaatagatgttaattaagtttagttttggggaagtttttattttcctcaaagaaaacagctgactcctatgtcacctttaacagtattggacacgtggataactagaatatggactacacattggtttgtctgggaagattctattaataagtgtgaaagtctgttgcaagtgacgtgttaaatgtcatagaagattgagcctgtatgacggaattataaagcaactggagaaatagtctttaaacagaaaatagaactttgagagatgttctaaatgctggaatataccatttacattttttaagagtaatgacaagacttaaaattaaaactcaacctaaatgcaaatggcaataacaatttgtaggacaaaagagaagcaaaaatacagctttcagagttatatattttaaaaatattctttgtttagctgtttctatgaagtaaaggagctccaaaagttttttcattaacatatcaatgccagtacatgaaatggagcagggtctgaatccccaagctgccaacgttgggtgaaatctattctgctgctggttttcatggcctgtgagttaagaatggttttgcatttttaagtggttggaaaaaaataaaaagaaaaatatttcatgacacatgagaattatatgaaattcaaaatgtagtgttggtaaataaagttttttctggggacagagccatatctaaatttatgtaatgtctatggctattttcacatgcaaagacagagtggactaaaatacttgctgtttggccttttaccaaaaaagtttgtcgatacctgtgttagacctctgattatcccaaacccacatgaatctcagactatggaaaactgaagcagctcaaactaaactctcaaacacaatagaaccaagtagaaaaaaaaattaaaataattgagaatttagggttgaaagaattaaatgcactgaggaaaagaaaactagatagatgaagactttcccactatggcattgttatttgctttacatgcaagcgttcatgagagagtctgctaaagccttgaacttagactttctatggctggttgtattgagtataatcaagattattttgaggaggaaattgacatactctttagacaataataggtctaattgaaattcctagttgtgtggatatatgcacaatttcctctcctgtctctctctcgctaaatatctgtggggatatattaaataattataaactgtacctgtattaatttcttatgtgtcaatgatacccatatactttttctgtttagcattcatagaacataaagcaacttagacttgagatgttatgtaattcagcttcccccataatggagaaataattcccacatccttcttattcattttcatatatctaagcttttgtaggatgcctaatctattttcagcagatttaagagtgagaagtatattcattaatcaaattaaaatttgcatctcaatagcttctaccttaactttgttatattttatttgaagaaaaatgtctactaattcttctaggttctagccatttcaatatttaagccctctgttttagtgcctatagtgtttctgttttctaggccaattattctaatttgttctgactattcttcatctttttggttgccttctttttattgaagtcaccctctatcacaccatactctagaagtgaattgtgcaatgaagagacactagacatcaacctcaatttggacaataatctataaatgtagtcatagttccaaagattttgtttggtagttgaatgtctgactcagtacatttcatgcctttctgacataaaattctgttaagccagtttttcttcatcttttatttgtgttaggaatttttatttatccacattaagatttttagtttccattccattgatttagggtcttcagatactttggagtattaacatcccagactatcacattagctatttatgccacctttgtatcatttccaaattttaaaaggatgtattcctttattacgttaaacgactgagtaaaataaacaatataaatcaagagatcaatttctcttgtcattggagaattcctaataagttgaaatgttctattaattgattctcttaggtatcattcattatgtaacccaaaattctcttgaatgaatcaatatttttctcagtttttatttaataaattcacaatgttataaagattttgaaaagggcgtacttgctgaaatagaagtaatagtgaaaggaagaaacgcagcatattttagtgatttaaggcatgtgttctgaaaaaagactacttggatttgcatttcgactttatcacctccaaccagtgtgaccatagacaaattatttaatatatttgtattttatgtaataacagcactaccccattaggttgtcataaagattaaattactatttatttaatctttggaagtctttatataccaacattattttcttctcattactattttgttttctctccaagtatccaaaatcatttgtttaaaagtaagttctagaattttgcagggaatccctgtcaagcctgtgaaatatagtcatacttctatggtgagacctctgtctctctgactttctatttttttttgttctgctcattttacctaataaaaattttatacgcagctttattttaatcaggacttttgggtttgtagtgcatagtatgcaaagcagatttttaaatgcattttaagatttttttcagagataacatagaactgtttttgagaaatatgatgacattcaaattaccctacattgttggatacacatctttcttcttatgacacattacagttttctgaaaatagggaatatgacttaaattcgttaattttctttgctgatctgttatgtgtctctgtgtgtgtctgtgcatgtgtgtgtgtgagagagagactttgtgacattctcatttaaagaattaaacattgaaaaacgctgtttataattgtactcatactttaaagcaagttcttaaaatactgtattaggaaacaggatgttacttgcatgaagtttaaaatgtgaaaagattataaaaactacaaccagagtgacctaattcacaaagtagagtgaatcttagagcaatgtgacatcatatacttcatgttggtttttagttacagaatagtttattctttgtacaaacataaaaatctccaagtgtatgcagagcttttagacataaatttttttcacaaaaatttatttaattttacttggttttaaaaaataataagtatgttctctttaggtttatttgaatattgatattaaatatgaaaaaagatgttaacctaaaaaagaaagtattacaacacaaccaccactaatgaaacatctaggccttgaaatacatcacatgtttaaatgcttgattttataataatactaaaaaagaaactcattgttcacatttggagaatttggggggaactgatgtttttaaaggacaataaaggcttaaagataaatacatggaagggatcaagcatttttcctgccttttccataaaaactgatcctaagaataaccaaatgattcatgaggtaactttgtgatcatagaaaccttctagaaaataagtgtgtaggaaattacaagccctaatgaagtgatgaattgcgaccatgatcatcagtggtggctggcatcataaaaggcaaccaagcagacattatgctcattatagaagcttgcaacaccatctatgaagtagtcgtacccccacatcaacttgtaccaagcctccagaggtaactatgcaggaaactcaagggtcaaaggaacattgggatgaattagactcatcaagggaactgcagatgagaggctcatagtggtggtggtggcctgtaagaacatacatttgttccttactaagttaaacattgactttaaacatttaccatgcaggagagattgatgccagttaaaggcaatgctggtcaaatcagcacttacctttttttccttgctgttcttccttcatctctatatcccttggctgtagtaaagaaagaagtcctaccttttaattaagacgccagtattcattgtcagatggtgctgaattataattcctgagtcaagattttattttgctgcttaaagcaaatttatattatcaaatagcaacctaaaaagttacaaggctatgtgaattttcatacacacttgggaaaaatatagtcccctaccaccaatgagtaagttcaaaaagacaacaggagaataaagttaagttgtttcagattatattaagttgtttcacggggtcttgccagtttcatgtttagaaaacttgagtatttatggagttccataatcaaagtttttttttaaagctatgtaaatattatttggggcttcctcagctatggaatcttgatttgggctgcctggtcctcaactaggtgtaagcatgctaacatcattgactgtctcttaaaagtacttttaagcatttttctgaatacaggattccaattctgctatttgtcttctttgcacatttttccaaagcaaaggaatttgaacaccactcttagtgtcaatgatgttgcatttcactaacaacatttaccaggtgtgatatatgctccatggggacaataatttttgtcagttttgtttaattttatgtaaccagaacctagatcctgcctggtacatagtaagtgttcagtaaatactcattgaactaatgtatttgagcctgagttttcttaaagctgagaagttttggttatataaagtgctggtcaacttcatcaattttataaattaaaagttatatgaagataacatttaggctgggcacggtggctcacagctgtaatcccagcactttgggaggcctaggctggtggatcacttagaccagcctgaccgacatgctgaaaccccgtctcagctaacaatacaaaaaattaatcaagtttggtggcagacgcctgtaatcccagctactcagaggctgaggtaggagaattgcttgaaccagggaggtggaggttgcagtgagccgagattgtgccactgcactctagcctgggtgacagagcaagaccctgactcaaaaaaacaaacaacaacaacaaaaatttaatattacaaattgttttcccacttctatatcctgttcagttagagaatctctattgaaaaacaaaaaatgaagagaattaaaaggagagcaaaataaataaaaactaaatgaaataatcctttagagaaatgagttgtgattatacttaccctaagaaaatattttaatttgataaaatataatacatttttaaggtgcagagaggagaactgagataatgaaatttttaaaatgtttaatcacatgtgtgtagtactgaacattttacactgtttattttagaatttgagtatgttgtttttgaattctatttttgattctgaattatcctacacaccaaatacttcttgttcttcccagaggcaaaaatgcagcttttccttttttgtcctccggttactattagtttattagtatgaccttttttttttttttcagtgaaagagtgctcctcttaaattttcatttattattgtggcgagttttataaagatggaacattgcaaaagattgtgttttattgattggtaaagttgattcaggactataaaggagtgtgttgaagtattaaattaaatattcgttctctctgtcctgcttcagccccttattggacgttaaagggtattacacaaatgaaatgataaatccagtttacatagttttcttatagacattgaactgcttctttcttattatgtctgaataaaactcattatctattttgtttcagtaataattatgagattccctcctaagcaattctttattgtctccattattctccatcttatagaatactctggaaaggcaagcatataaatatgataaaagaattaagctgttgaaataaattaatttattgtgcaacaatgtattcaaatcttacttgctcaatggattttactttaatgaaattcttcaaagaacaatacattaggttccaaagattgaaattatacattaagtaaaatgactgaatatgttgtgtctcaatttatagaaagtttcaattgaatagttaagcttttaaatcataaacacttgcataaattaaaatattttcttcaaataacagtattaactgttgtttttgtatcctttgttcttgaacacaaaactacaattaaagcaaaaactaagttaaaggtaaattaaatactattattttacttatacatatttactgagctttattatgcttttaaaatgcattttacataaagatttcaatctaatttatttttacttagtataatatgcctttttaagagtattttggatgtgtaaatgagtaactgaacaattcatgaattaaagggatgatcacagacaactttgacatttaagtacattgactaataaagcatttttctacttatatgggaaatgttaaaataaacaaggaattattttaatggcataataattgtttccagagatttatgcattaaatatttaagcattttatgagttaaatatctcagaaaaattatattctcatgctttccattagcactaccaagaaatctattatgacaggaaaatcagacttgcaaaatcattttagagagactgatttatttcaagattgtactttatgtctgttcagccaaacatgcattaacataatgattaagaaaaatgttaaaatttattgatagataagcattgatgtgagtgaactttggaataaaatagaatggttaatttagaaaattctctttatacaaaaatatatcaatgcattttcttaaatacacaccatgtatttctgtgtaatccaagtgctaacagttagatgtattaggaattagctctaaagcttagacaaactatgcttctattagaatttcaagaaatcaagattagactttaagagtatatctctggacatgtatgcagttagctgcagtattgtttcttgatatatttatacaaattataaaggagttctacatatagccttataaatgcatcctctatgataagtgcgcaaatactccaaaaccatacacaactaaacttttgaattatggtgtggctaacacaagccaagattgtcttttgatttgtgattacaatgatttgatatgagaatattgccatttgaaacttctttatagtttagggtaattataattagaagacaggaagtaagttttggcatccagatgtgaagtttctgctcttttaagtcatatacatgtttgttttttaaaactgttggtcgtttgtttgccttagacgttttagaagcatacatgcttcattttgttagcttggaaaagtaactgataatatattcgttttccatgttacctgtgataaagatttcaaaatatcttaatctgcaaactgtaaagttggatgccatctttctgtagtatcctagcgtgtaacaaatgcatacatgttataaacgtctctgaacaagttagtttcaaattttaatatctgggatgtatgtttgtctttgtccccccttgttttctctctcctcttcccatctcttctctctgtctctttctctttctctctccctcccacttatttgcatatttgcagtattttaagtggaaaccccacataacttgagatggaaaatatattgtgtgttgcttacatttacctacatatcagttttgctatttgcataaaataaaacacttaattgttaaccccgatcaattaaggtaaagggctaatgctttttagtataatactaacaatacgtctgccttctgtgggagtttattgtcttttacagaagcctatcagcacatattagctctgtacaaaaactcttaaagttcaacaagttatcattacgacaagattgtaatacgcattgcaactttcgagattaaaatttaattgacctcttttttcttttcctttacaatattgttttgtcatgaagcttcttatagcgctttttttttttaattccatggaatatatgttaggaaaccattttatgacatggatttgggaaaagggcttggctattttttctggttattttcattttatttgtcagggtcttcaaaatgaagtctcagcatatctgttgaagatgtttattggcaatgtacatcattgaaaaattaaaagagtgtgacaaaagtacagctcaatcttggttccatattaaaatcatagggagagcttttaaaaagataccgaagtctgggtcccattttagacctagtgtattagatttctagggccactgtaacaaagaaccagaaactgggtaccttaaaaccacagaaatttattgtctctcattattggagtctagaagttcaaaatcaggagttcatgaggaccatgctccctttgagatactaggtagaatccttcgctttctatagcttctggtagcagctggcaatccttgccattccctggcttgaagctgcacaagtttaatctcttcctctatggtcacatgacattcttccctcctatcttcacatctacttgtaaggacacgactcacgtgggattaaaagccaccctaatccagtatgttctcatcttaactaattatgtctgcaaagactcagttttcaagtacattcatattgatagggaccaaaggttagggcttcaacagatctttttggggaacacaattaagccataatactcagtaaaccagaatctctgggagtgaaactcaagcataagcgcatttaagaacatgccaggtgattctgatgtgcagcaggatttcaaaccatcatggtgctaatggaatcactttgaccaaagatgagcacgatcatcattctcactggcagtacaaaacctggaacctcctatttgttttccgtattaagttaacattgacattttggaaacattagcctcctacaggccaattacattttagattttttttctctattttgtaattgcatattttctctctaataaggaataatgtactaattatttataagtacattatacatctacatactttatatagttttcttccacacttttaactatttattattacaaagacagttcatcaaggcctgtgtctgttaataactgagggtataaatattttgctgctcaaagtagaaaatgttcaccaatgggtaccttctttcttaatctgtaattccatttataatagctaattggagacatttatagaatctacttgcagatttgtctaatggagaatgtacagagcttagagagggaggtgtggagagagacaagactgttgacataaaatagagtatcaggaagcacagtaccaaatttccctgggacatgattgatatatatttcataaatgtgcccttaatacagttgtgtggttgaattgaagctaggtgtggtaggtactctgagaattatttaaaccaaagaaaattattccaatattaaataataatccatttccatgatgcctgaaaatgtgactgagtatgtccagagcagtactaggatggaatacctgttaaaaactcctctggtattattattatggtcagtcatgttgataatgtgtttattacatgatctttagatacttgcagaaataagggaatatatttaaagatttcttcaaaatgataaataatccttctttattctctgagatctttgttgtctaatgggttcttatttgtttatttttgggcgtcttcctagggcttactttttctccagagtggattgacattcgccattactgcagtcacgcttacctgtagaaccatagtttcatagaccatctttttctactttatttggcttgctcaagataaacatatcttttagtacagttaaatgctgatgaagtaaagtgtttattctctttacatttcttattgtattgagaaaaaacaacattcattaagtaaagatccgttgtatttaacatcttttctaccctccttccctctcttgctggtgcaggagcgtgttcctgatagcccctcacctgccccctctctggaggaggggagaaggcctggcagtcacccatcatcacatcgcagcagcagcgtgtccagctcccctgctcggactgagagctcttctgacagaatccgtaggtctcatacttctacttgtcaccattttaaactttattagggttcagctggattttctaatcaacatgccctcattccaaatagatctcagatggatcatgttctgaaactctgtagcaatagccatctctcaaaattatgtttcccagtttgcaatatcatgaggtatgatactacattaacaggtcctgatataaatttcctctctttgatgccacatataaagatttgagctatgaaacagagaaaataagtaaccgtttagattggtttctgaagtaaacacagccaattctcaaatatctagtgtcttggtacactgtttatggattattcaacatcattcctcaaatcctactctgccatttttgtaattcactgacttttaaattttatccttgtgttaatggagatatccacaaagagaaatcagttaaattcaaaatactaaacttaaaaagcatacatttctaagtcattcaggtggtcaatggattaaataatttgaaattagctaagtttgagaatttgaattagtaacaatcaataatgcatagtattgccatatattgttatttttaaaatttggaaagtagggctgtgtgttattttataatattttcacaatatttaatcttggtagttatggccaagaaaattaagaataaagttaaaatgccatccaattaacaagtgatttttgtgtctgtacaataatctcagattgttcttttgataaatgactatattaaaagagaataacttgtttgataaaacctatatatattgcttattcccagaatttagctattattttatgcaattatgtttatagcatacacttcatctaattgtacaaagtttatttaagttatttggttgtcgagaatattttcataataggaaagcattttctagaaagtcactttataggttataaaggaatgtatgcataaagtgaaaattgttgatctgggagctattgaagtggataatttaaagattaagttgaatgctgtgtaaataattataaataaaagatagtcaattattggcaattatatagttcaacataatactaaatatatatacttgctttggcctgccggaaacgtatttccttaattttgtaactttatatacaattttaaaacagttttcaaatgaaatatttactgtatatttttatggtatgttgacactagaatcagaaatttaatgataaatattggtttcattataagatattgtcattggaaaggtgctgtcctagagaaaaaaaaattggaacaaaatgaaaatgatggacagatgggggaagatttgaatgagttttgttatacattcatgttattttagtaatggtaatattcttttttcaatttttgatagaaacaaaggagacatttttgtatgcctgggataccataattgttgaaatggaaatacatccacatccacacacatacatatatatgtacatatatgtaacatattactttaaagtaattttagactaacagaaaattttcaaatataatgcaaatcattcttatgtgtttgtcatcctgatttacctcatcagtcaaccaatcaagttctctgaaagtgatatctcaatataggcataatgtcacctagtgcttctgtcatagatttaatacaactttatctcaaattcatcatcgtttatcttctagaaacaagagcattattttacataagagaaaaatgatcaaaatcaggaaaataacattattatagtactaaaatttgaactacagtttttatttaaattgcactggttttcccaccaatattttttaaagcaagatttttttttttttctagctgcaaaagccaatctatgatcacacactacaattagttgtcatattctcttagtattctttaatctggaacagttccttagtccattttgtctttcagtaactttttttttttttttttttagtacaggccatttattttgtagaatgtccctcagtttggatttttttatgtttccttttgattagtcttaggttatggatgtttggtgggaatcacacagctgtgatagtgtgtccttcttagtgaatcatttcaggaaacacacatttctacagtaccagcaataagtttatcactttcttaaggtggtgactactaggtttctctattgcaatattacttgttgttgatgtttacctttgtagatagtgagtgcctggtgagaaaaatatcttaagactatgcaaatattctgttcttagcaaacttccattcactagttttagaattatcccttgatcctgaaacaattattattaatggtgtttgccaaatagcaatttctactatattattcttatattttaaaaatttacattttccagataaaaatcttgttttatgcaaaataaaaataaagtgaggtgatgtcattttcaatattttctgcatattctgacaaattatcatgtttatcagttatcacagtgtttttagggatagattataaatttaaaggtagaccattatattaatattatagttactgttgagtccaagagagtttaattgacttattggaaccttgtgtgttatggtgtttttgtgttttgttttgtttgttttcttttgggccataatagcggtccatcagaatgggttgtccatgaaccagatgctgatgggcttatcaccaaatgtacttcctgggcccaaagagggagatttggccggtcatgacatgggacatgagtcaaaaaggatgcatattgaaaaaggtaatgtatgattatatattccttgtttttcccgattcaatagattttagaactagattttaatcacacaatgaagtctatctctacatcatgtaaaaaaaaagcatataaatgtttttaaaatccacaatattaagtacaaattaaacctattcattcaacaaaaaagagataagaatgaagacctgctgcacttctcttacacaacaggtaagttacaatttagttaccagtacattaaaaaaaaaagtcccaattgttatctctcagttcctaaagggtctgctatttgactttttcaataccttcagggtcactgtcattttacttagcatgatagaacaataacaatatagaaaggattattctgtcttcttttgaattaaaaaaacagtttacagaccaataaggaaacagaaatatattttatatgtcaatgtactactagttgtttcaagatataccaagaaacctcaggttctacatagctaaaaaagtttcttatattttgttaatgtcaatcaaacccatttttcacaggcaaaaatgtgtattttcatgccttatttgataattccatgaaaaaattaaaatattttagtcagcatattagaaatttattcttggagatgcaaatacgtattttcaaattgtaagtgttaaattgtggatataagaatcttcccacctattttttattttaacttaatattttcaaactttataaatatagataggataatttgcttatctttttttgacaaagccatcaaataatcagtgttgtgaataagggtatttctttggaaaacataaaaggggcacaattaatcagctgtcaacaaggaaaggaaacaaaattgggtatttaaataattgaacaggaataaatgcgtggagggagattaagttaaggaggggtaccttcttcccaccaaaaagactactcacaaaaaagtaaaaatgcttacataaaacatttccctttcagcataaaaatagctctgctaaatcccttagagagaaggagtatatttctacaaattagattatttgagctatggaatgtcagagagaaaacaataatctaggtactaacatgttaacatctaggcataattgagaaatagagacattaataaaatttttacattatttattgtgaaacttgatatcaagtgctatttatattaggcattcgaatgcagtgcacgactaggtcagatggtctctaaatttttaacttacatttttttcacaacctcttcattaacaataaagcagaatgtcatgtatattatccatcatatttattttgacctatacttttgatatttaataaaaaatccatgcatagcaatattgtaaaaattagtatagtggggctgggtgtactggctcacacctgtaatcccagcactttgggaggctgaggcaggcagatcacgaggtcaggagtcgagaccagcctgaccaatatggtgaaactccgtctctactaaaaatacaaaaattagatgggcgtgatggtgcgcacctgtagtcccaactactcgggaggctgaggcagaagaattgcttgaaccctggaggcagaggttgcagtaagccgagatcgcgccactgcactgcagcccgggtgacagagtgagagtccatgtcaaaaaaaaaaagaaaagataagaaaaattagtatactggtaaaacataaagtttcatcgaagactcaagttttaagtaatgatatttaaatataataattaaatgtatgggtgtcacaatcattctccactagggttgagctaaagggtaaagccctacagaaaattatttgagtcactcttttctcaattttcccttacatactatttaccaagtttaacttgggatgcataagaaggaagttaatttatgttatacaatgaatgtcaggatattagagctaaattctcttgcagcaccatggtggagaagggctaagagaaatatacaagtccagaggtggtagtgaagagaaaaatacaaaaggaatgaccagtactagaattggaataacaaatctcactagaatttttggtggagagctttgtgcaatgttatcctttgaattgacctatatttttcataactattcctttttcatatgtcaagatttcaatctctctacttatttattattattataattttgccactgtggagcatttgttgaaataatatactaggttgatgatctaggcatgttttaaagtatttgctttgttatttggaagttatttcttcattgctatccttccactactagaatgtactacatttgctttaaacagacaaggcagtctttgagtgcatactgatctgggctgaattactggaagtttctaagagatagacaagagttaaaacaactgtggagatcacatgctttaaggattaatagcaaggccaaaggtggaattttctgaccttcataaagcacatttatatgaaacacattagaacattctgaccacgaatatacataaaaacttactatatcactaatggtacttacatcaaggttttataaattgttttgctgtaagaacaaagtccttgaccatagcccgacagtttcccaatattttgacatatattttataatgacaaataaatttttaagattctccctagaaatgtgaaagtatcattgatttcaaatgtgtatatgtaatctcaaaattttaatagattttgatactattctagtaagcgttttgttatgtgatgcttttctcttgtgtgtaccttcttttatctagtttttaatatagtgaattaatagtaaatattcataggctttctaaattgatagaaactacgaaattaaaaattgttttctttcatgacaaaattttcatgggcctcataatatccctgtaactttcctacaactcatatctctatcaaacagataacttcatttagagatagatatttgtggagaaattaattgtatgttcgttacattttaggcttgaacctatatgtaatttgctgcctgccaactaaattattcaaaggacaattaattctttagaaaacactgattccaaaaatagatgccaaaatttatttgtattctgagaatcactgtggtctgaaatcttaagcatcagtaacttaaacattttatgttcttcttaatattaaatagctatgggctccattctattagcccaaaaaattaagtcaccattagttgaaggaccagaggttttaactattgagtaaattcattccattttaaaaataaagtatgctcacataaggttttgagcttagggagagtataattaaggcatatatatatgcatatatatatatatatactatatatataaaatacaaaaacaaatgttatatatataacaatataaaatacaaaaatataaaaatacaaaatgcaaaaacaaaatgttatatatatatataaaacaaaagttttaggcttgaatctatgtcagttcacatccatatatatgtatatatatatatgtatatatatatcccatatatgtatatatgtatatatatatgtatatatgtctaatatacatatatgtatatatgtctaatatacatatatggatatatgtctaatatacatatatggatatatgtctaatatacatatatggatatatgtctaatatacatatatggatatatgtctaatatacatatatggatatatgtctaatatacatatatggatatatgtctaatatacatatatggatatatgtctaatatacatatatggatatatgtctaatatacatatatggatatatgtctaatatacatatatggatatatgtctaatatacatatatggatatatgtctaatatacatatatggatatatgtctaatatacatatatggatatatgtctaatcccacatatatatatgggattacagcacccaccaccacgcctggctaatttttgtatttttagtagagacagggtttcacgatgttggccaggctggtctcgaactcctgatctcaggtgatccacctgccttggcttcccaaagtgctgagattacagggcgtgagctaccacacctggtctattagttctgtctctttctctctctctctctctctctctctctctctctctctctatatatatatatatatatatatatatatatatatatatatatatatattcacatccatatatatatatatatatgcatgaaaactgtctttcagcttttccaaacatccggagtcctcaagagctttctgtgttttaaaacattgctgatcttttccctcattctaaatatagtggaataggctgtaataattgacatttgtggtatataaataggctcactgtttcttgatgctagagctctctgtttatcctccacacatttgtccactgacgctagtttacagtgttgctctctcatgcataatttgttttggtttttcttaaattgctgctactttcaacaaattttggagcacacttcttaccttgcctgtaactcaatatgtacatttttgttattatacgatttacctaatttttgattgatcaaaaattatatatatgatggagataagcctataatattaacttcttccaattatagaaaacttaagcatttatagttgtgactaactgttgcatacctaatttgtattattgtattttggtcttggattaagtagtccaatgtgatgtaatcaatgagtaaatatttactgaaagctagatatgtgaatgaaaagaaatgaaatgcaaatcaatcgctctctttctctgtctctccctttcctcgttaaaattatacagatttttttcttgatatgtcatttctcctacagataaggcttttctcttcatttgttttcataagaaataagaaaactttctttcactggtgacaacttcaggagaccaacatttcagaggcaggactaatctgagggaggcaggaaatccaggggatttgcttcaggccataaagcccttcttttgtgtcatattctgcttggtggggaatgctcaagatttccaatgctcaacatctccaatgcttaacatctttgtataaaaacttttcatactggtaatctaaagtgaaggacacagcactaaagacaataatgtagttagcaaactggccatatttggctttttgtctcttctttatattttagtcttagcatccaatcttatggaccattttcatacaaagcccttttgaaagaaaatcattatgtatcactttattcaagtttttggaaataatttttgaaatatatttttatttgtgcagttctcattgtttaaaaatcctaacttaaatcaagattgagtcttcaaaaatgcagcaacatgaatggaactacaggtcattgtgttacgtgagataagccaagtacagaaagacaataagtacatgttctcacatacatgggaactacaaaagcgtatctcatgaaggtagttagattgctggtttccagaggctgtttagaacagtggggaggagagaggattaatgggtccaaatacacagttagatagatgaaataagacctaatgttcaataaatcaatagggtgactatagtttacagcaatctattgtatatttcaaaatacctagaagaggataatttcaaatatttctagcataaagaaaagacaaatatttagggtgatggatatcccaattctactgatttggtctttaaaaattatgtaaatgtcttaaactatcgcatgtactcccaaaatatatacatctattatgtatcaataaaaaattaaattataagtaaacaaatggcttttttcttttaaattctaaatagatcttattcaaattaatcaatactaaatattacatacaacaactatatgggagcctgttagtatctcctgtgtctatatagaattgcatagactaaaagccttttttctttaaaattttctatattttgataatgttaacacatattatagggccatgagtattttcacttgtaaaattctctaacacgcaacttctcctttacttataccatctaaatatatcttttgttggcatatctcaaagtctcctgtaaaatattctattacctacctatgtaattttcctcctcagtttccatgcctcgaaaataagtgttgaacttagtgccatcacttttagttctgtgattataacactggacaacaacaactttctttggatcccagagctctttcttaagtagatagcagatttcatatgcaaagccgtagctcagcttgcttaagacactggttttgttattttatgaattatttctaggagcagagcttgtaataatatttcaatgacaattgaggaaaatacttactgtaagatattcataacagccctgtaaatgatgggcaattggtataaaatatagactataatatttatttactttttacccatgcgccttgatgaccatcacgtcacactgaactttcaagtttctcaaacatcctctgtcctttcctacatgatttctgtttctttccttacatgggatatgtatgccttcctatccactagtgttcagcccaaacttcttcagggcaggagctatgtcttctcaccttctttgtatacttagcacagggtctggcattagtgggtacaataaagttcttttcagagttaagtgagataatatatgtctggagtgcttgatgcatataaatatccaatggaaaccattactactatcaagttagctaatgagcaagtggtttgattatataaattggaaaatatacatgctttaaacctctgaattagaatattatctatttacaattcataataccacagttatcatgatttacatttgaccccaataggaaatttgaaattataatattgtagacagcactttgattacatatagctaaaatgtaatgtgtacagttttggaggaaaaaattgctaaattaactacattaatcagctattttatatgtcaatgattgtattaaaaataatctttatttatttaatacaatttcaatgaacctagaattcattcaataaatattttgaggagaaacatgtgtgtggctgtgtaaatcacaggtgatagtgggtattagatgtgaataggctacaagagagtgggttagaaatcaaacaagattccctctgatgggtaggaattctgtctttgaactactcacacatgccacttgtaaagtaaattactacagttttacataaaggttacatttcccaggaatttatcatacaagcaatatgaatattatatttaaaaatagagtcatttattggtgttgacaacctcagtggtttctcaattatatctccagtacatcttttctatgtttagattttagcaacttttttgtatatttggaaaactgaatcacgttaatatctactgataattttcatgcactatatgtcaaagagacaagagcagtcttataaatgctataaatttatacattatagtagttttacttgtgatcagatgagatgccttttccgcatttaaaaaaactattattccacttaatctgctttattttcttaatacggtaggtgtagaatgactcacttcctcactgtttaagagattgtttttatatagttgtgcaaatagataatatttttaaagcattaaacgtgaggtagagaacaaattactagtagactcacttatcagtttcacattgaaatttgcttcatttaatgatttatcaatcatcataaattcccttattttattgctttcatctaagatgtgattggataacttattatttggcttaatgaattggttatctctagtttttttttcctgcaatttactagcatattgctagtagatttctttcagttttgctagtttccagttgatagtttgcatagtctagtatggaagtgatctacagaggaaggttatgtgtattttttactatgtctatttgagtgagaatttaccccaaattgaaactttttctttttctttctttcttttttctttttggtgacagagtcttgctctgttgcccaggctggagtgcagtggcacaaaacatggttcacttcaacctccacctcctgggttcaagtgatccttgggtctcagcctcccgaatagctgggacttcaagcacacgccaccacaccggctactttttgtatttttagtggagatgaggttttaccatgtaggctaggctggtctcgaactcctgggctcaggcaatccacccacctcagcatcccaaagtgctgagattacaggcgtgagcaccacacagtgcctgaaagttaattttgagaatagtaattaacaatccaacattgtttagtggagctgaagatgtttttattttgcacattttaattttgtaaatggacagctatgtttttttcctcaaagaactataaaacacttgttttccttccttggttagacttatttagaaatgtacaaaaatgactgttaaaagttcagtgattctaacagctttcttattttttaatatgaaagaataacaaaattcaaattctgagtttccacagatatcagattactctgtatgatgatgtttttatggaataaaggaatagaatatctgaaactgcatatattttgacctaatagttttgaagtttctaacctgagatataaactgccacatggacatataataatttgacataataatgacttttctacaaacaaagttttttatcttatggctaatcatcactaaatacaaataaatttcttgtttgttcaaaatatcttccaagtatctaaatttttaaaaagagaaagtgttgccacttaaaaacatattttcaattttgcctaacactcacagtctacttttattaaaattttttataacctcacgtgtgcacacgtatacccctgcatacacacaaatgctttaacttctcttggtagatgatggagtgatcttgcattaaatgctgtattataggttaagaagcagagtaacacccctgttgtttcttgtgcttggagcagtttgaattcttccatcaaattggtaggatgatttaacacattcagtcagccttgtttgcagggcttgtaaataatagccaagcttaggtaaatcccaaagacactagaactaatttgaagtttatatgaaatagatcaaaagttaatatggaactagtggttattatgtttaaatgcatagtaacctgatgatattttgaaggtattttaaaggagatattgcccacctgctatagaaaactgggtagtgtttttctttgacttttccttgcttactaccacttaatcttgtccttttgacaaattattcctagagaggtatgtgataacttctgtgtataacagttttgtcccagtagaagctgcattttagattttctttaaaattttacattactattgttgctagtatcttatgctacagtttcagaatattaaacaagtacaattgttttaactactgtgaaattgacagatgaagctgaaaaccaaaagcacctttcatgggattttaaacaccattttcctccatatgccatcccaattattatttagatattacattcctaatttactgttaaggttgattagaattcaagcctctcaaaagcatgcaccaaaggtcttgggctgtggaaaacatttttataaaataatccattaatgcagaggagtgcaactaaattagttagcaatttgctgagcatgaattaatgaacagagcttcttccagctcccagagttgtaattttcataataacctcagacctttatttggcaggttgtttagttttttcgtttgaaggttttcattagtctaatgaggactgtgcaagggcgagcagtcagcacaatttacatggggaagctatcataataaatgaagcaatttgaataacacgcaagggtttatgcaacaagataagaagagattgtagagcgagatttagaggtaaccaatacattagaccaactaataactgaagtaatcccaataaaaggcttaagtgaaaggaatgaaattaatgatatatacaaagttgtaatgatatgatacatgattcattagattaataaaataagtattcaattgtttttagtgcttttggtctaagctttgtttatatcagacattttaattaggattgttctctagatcactttgcttagttaacttttagaccatagctgaggtttttaatgatattttttccttcttatttaatctttatagccttgatagttcattgaattaattataagcaatatattgtgtatagaaatgctttttaaaagtaattgcatatagctctacctaagtggtgattaaactttaagaatgaatgctcaatatgtttctaaattcttaaaaacaactgcttttgcttctactccaagcaagtaaagtacccttatgttttaatgttctataatttcatatcaaaatagtaataactaagtattattttattggtatatttcaggaggagccatttattaaatacattattagaaatttattatatccaatgtaaatctttaagatacaagttaaaaaatttactttaaaaaagccataaattaattttcttctttatatatccctcttttgaaaaatgtaatctggtgcacaagtgcttgagaattatacttttgtgaaggtaaatcagtctgacaatcctgtgtgcttttacgaagctgtgatctgaggaaacagttgataggatgatttaaaaaaattttattgcaagcaatataaactttagaaagctgatctgtttgacatatggagccaaattactttaagtaaaatgtaattttctacataaaaatgtatcagccttcactggatcactacctaaagggaattccccttctactcagatatctgtataagtggccaaaattgatggatatttatgaaggctttgccattctgtgctcttcttctaagtttggaattactgcatgcctctctgccttgatttcaaatcacagcttcttggatgtagaaaatttaatagataattatcttcccttatgttaatgaagggaacaagttgtttagtcttcatttgtgaatatgttaaagttatgttaggatacttttaaaaaatcatgatggctatatatttcaaacttgtgattacatttgtctttatggttcttcatttaaaagacagcacaaatgaattattttgtggactatattttgttaaaaatttttcaataaaaaatactttcagaagatgagacaatcattaattagttgaatgtttcacaggttcatcccttcctttccttccttcctccctcccttccttccttcctttcctccctctctccctccctccttccctcccttcttccttcctttcttcttttcttctttctttctatctttatttaaaaatcgtgataactatgagatactttgaggttactaatgaagcatgaaaataagtatataatgcttttatactttcttcaatttgctatatattgaccttattatttatcatgattgttattatttattatccattccataataacacaagtaatctattatggaaaaatcttgaattcacaaaatagttttatattcgtctaagagatgactatcactggaagcactctagcatgagggtaagaaaatatcctcgggattagacttctctatttaagtcctggttaaaatttcgaacttgggaaattagcgaatgtccgtgaccttcagtttcttcatcggtaaaaattcagtttgtagtacttgaaaaaagcaagtttgtttttataaaaattagcaaaactgttccatctgtatggagcactgtatacgtgttgtgccatatcactcagggtcctatcagaaaacagacagctcatagaagtaagataattcaaggtgtaggtacagaggatgatgcagtaatctagggcttagtagaagccaggctgtcacattctggtgctccatctgatctgcttgctgggttgtttaattaagtaatctatccataggacttggattcatcctaaagtcacacagatcagagaggaaggcagagagggtggacagtgaatctggagggccctgataagatttgtaattcaccaggttgcaagttccatgaatatgtggtggggtctatattatttacaactggatcttcagtgtctgtcacaaagactatcatactgcagtgtgttgcataaaagagaatgatttatctgttcaattatcatttaatataagtgatagcatttagaacaatacaattccaggaaacatttgtgaaaggacatagggaagttttgcagtcataatctcatacatttaagtaaaatcacagtaaatgatttcttaacagcattatttttttaagtgagcaattttctctattaatttattcattcagaaatttgttattacctgctatgtggtaagcaccactgtgcttgttgctaaaaagttagagatgaatgttaaacaaaaggacgtaggacattgttgtattttcaaaccatactgagaagtttttgaataaaatcaatgataatgaagactaaacccatatataggagtttatctaaactataacctctattcaaagtagtcatgtgtctcatggctttgtttttcttttacattttactggcaataaggaatacgcaggaagatttccattctctctctgccacacctacccaatagatatagttctttctacacctatggcttgtttgagaattgtcataggcagttgagtgctttagtggtaaggtgggatgattctagagaaagatatgtggtaaatcactatcgtattaagagagaaggtgtggttcttcttgggaaatcttagtggaaatagcctatttaaacctatggctgaggataaaatgcctttctgagttttgctatagttgtgtgctttagtggtaaggtgggacaattctagagaaagatatgtggtaaatcactctcgtactaggagagaaggtgtggttcttcttggggaatcttagcagaagtagtctatttaaatctacggctaaggatcaagtgcctttcttagtttcgctattatttacagatgggacagagactacgcatgacctatgtcataaattaagtattgtaatcaaggggaattttttggagatgaatggtgctacattctccatatcagtattgtcccccttatatctagaaaaatatccaaatcaaggcagatggggagtttaagcaatatatctacttacctcacaagatttcagttagattccctatgcatctcttagaaaagtacttggcccatggtatctgatcaagcatgttagttctcattgtctactgagaaataaatcagaattttaacaatgtctctctttaatcatagtaatagaaacattatgcgaatcaagagttttttgatgttttttcctctgaattgaaatgtattcatttgttcttgtagagtttattatttgttttaatcatctaaatatcttgatttttcagttcatatcatccttactaggattcaacttgattttacgaaaaacactggattaaatatgcataaaagactccaatgtgggatgtgtgctgattccagtgtatcctccagacattactgagaccaaaagtgatgcaattacattttccttttgttgcttttgcatttcttgtagtgaacctaagtccttcagatcccaataaacatacaacctaaattcttcacataccataaacacagaccttgttgtttcctgacttaaatccagttttcaaacttaggcagtgggtgaaaggagagagaagtctatgccaataatattggaaaatctcttttatgccattaatttcagttcctcaaggatcttcaatctttcctttcatgaatgtattttattttgctgtgatctttgttagactaagagctttcatagacttggaataatttctgatagtaaaatagctgagcttttaatctcctgaaaatgctcacttattgtttaaattgaatattacttttggcatcaaatagccaaagttctcagcttccttatatagaggtagactggcttataagttcttattttctctataacatgtggatggtacagtgagaaactttgaagttagactttagattagagtttatatattttctttgcaggaaaatttggcttccaataaaattcatatatgaaacactcatgtattttcagtgttctggaaatcatggcagtggtttaagattaaacagacttttctcattgttttagacaagccaaagaggagagagatttatttattgtggaaaaattttaaaatagaaatttagaataatgataatgacattattgatatttaaaagtcagctatcgacacatgtatttttctctatcaattctttatagctaataatttaaagtttttaccatgaaatgaagaaacagcctgtatgataataactcagatgattaaggaataagttatattttcatattgtgatgtaataagtttatctgaaccacaatgtactttttatacctgatgtacaactttgaactttgttttttattttatttttcaagtatgtatgtatgtatctatgtatgtatttatttatttatttgagacggagtttcgctcgtttcccaggctggagtgcaatggcgcaatctcagctcactgcaacctccacctcctgggttcaagagattctcctccctcagcctactaagtagctgggattacaggtgcccactgccatgcccagctaattttttagtatttttaatagtgaaggagtttcaccatgttggtcaggctggtctcgaactcctgacctcaggtgatctgcctgtcttggcttctcaaagtgctgggattacaggagtgagccatcgtacccggcctgaaatttgtgaagatgaaaaaaaaaaaaaaaaaaaaaactgggcaaatatcagtgacttttccacaaatgtcaataattttttaaaaaggacagcaagctaaaggatgttaaatgtttaaaaagctccatagaattctactgcaactcatttttagaacccttaaaattaatataattgaaataaattgcaaagcaaatttcacagggtattctttttctttaataacaagaatttaacccttaacaccatgtaaaaatgtcagtgttttcatttgattatggcagacttctcttttctgacaacaaatgattcatgtgatattatcaataaaaatgtaaaatgccatataaatgaacttatatatggaaaatgtaacctatagaataagatatgtatacaaatcgcaagtccagtgtgcttcttgtaaagaaaaagttttattcagatcttagagtcaagcaatgaatttatttctttaattgatgtttttataattgatacttttattgaaggtgtttcatagtttatttgcataattaaatattaaggcaaactatgccagtttgttttataatcatgatcattatgtgaaataagctcaaacatacaataaagtttaaaagcccttacaaaagacatttcaggaaactataaaaatacttctttgagtaactgatactcattgtcaaggaagcaatatttctttggtgttggttagtaaatctcttgcacctagttgtaaagtattctgaagtaaaatttctatagaaccataaagaatcaggttttttaaaaaataaaattacatatgaacttcattatccataaggaatagcatcataatttgcacttattacttatgaaaatatttctaggatggtaacgtaattcattattacataatatttatttctctcctacttgagaaaaagtgctatgtaacatgataatctaaatttaacaatacataaaataaaaaacatagcatttcctttataataggcatattaataggacaagtatatgtgttaaggaaagggtttatgggttaatagataaacaatcatatatttttatgttggtgatcatttaatcagtgactttaaaatttctttccattttaatttaggcaatattatagaagttgaagttgagtttgttcaatgtgatatttttgtcatagactaaataccctaagtcatgagagttacataaattaagataaaacaaaaacctacaggttgctgtaatgttcagagctctataaggtttcaaaatgatctttactccattgtaagaattatgatgtcatatggaatgaaagctccataaaaaatctggattttttgatatgtagtatcagtttcatttattaatgatagttatggtgatatatgattctgtgataacccacatataatatccatcctaagaatgacatgaccaaaggcatttgtaattatatttacttctgaaagattatggtttatagttaaaacaaaagaggcatcctgtcattttctaaacccgttaaatgtgacagaatctatttttctgccaacttgtgaggaccaggcagagagcaaatttgctgtggtcagctaagtgtaaccactgagcaggaaagtgaatttaataatgcattattgttcttcactgaaggtgaactgttacagtgcctttgttatagcagactttgcctctgcttaggtttccagatgctgtgtagattacctgattaaaatctctaatgcatgataaaatgtaccaggtatacttttatattaacagaaatgcatccattttagggccataatactgaatctaattggaaacattttccaattatattatctagtgaatttatattataaataaatatgatatacaatatagaataaatgacatggaagcctaaattcataaagtttatctcatgccaatgatagatcattttattgatactgaaataaaatttaccatatttttgatgcaattaagaatatgatcttttaaatcatctttattttgaatgttattttaaaacaaagtaaaaaatacaagatactctttaaaatacaaccagttctttcatgaccgcattctttgtattgcccttccttttccagttccatcttttttgatattttctcttacaaatacattgatcaaccatagtactttcataaaagttttagtgctgattgagttgaaatgacaggaaataaataaagcttggtgtaatttactttctctattttacccaaatttaattcactaaaaaataaaatatgtgtaaaatagcatcttaagagaattagccagaaatacaaactttatttaggaaagcagaaatcctcggggaatttgtgcacattgattccttttttactgcaagtttttatattgattatagttcctatcagtaacattttcagagagtttatggatatattgcagattgtgggcttctgttaaccactggtattataggctcatggttgataatcaaacagttaattttatagttaattctgacaggtttctagaaagtctttcgaaggaaagattttctgtagtccacaactgaaagggtgcacacaacctaatctttggttgtcattgctgaactttatggttaagaggcaaagaaaagcatttttctgaatatcaagagcacccatcaatgaatatcactacgggccatagaacatgcaagttcaagagacagaagcaaaacaggagttgacaaaaaatagtaacagctagacccggtgtgagagtgtttttatacaacagtgaatgagaaaatgattttcactatttcttgcctcttaacaaatagagctgtgtgtatatggcagaaccataacaatttcagctgttatacatttgcattttgaatatttagacattaaacatttaaatctcattcaaaagattaaaaaaataaaatataaggaactgtgcaacatcgaggaatgaaagatgacttttatgtgataaacataaatatccaataactgcctaaaataaactctgaaattaccatgttgacaatgttatttcctctttttaaaaggacaagaaatatgaaacgaaattgaaatgcaacaaatacatgttttaacctgaccctgaatcttgtgtttatttttgttttaaataaaatctagagctccgtaggtaagataggtgccagcatttgaaactgcagtcatttttaaactgagtatgtttttatttttaaactaaatgtactatgctgtttgcatttcctaaaaatatccagaaactctggtagtttgttgttcagtgctcccctggagaattcatgtgaaggtctaaatattttatactgttgattttattaaaatgtgaagatccattttgtgaccgtgtaaatggaatgtcagtgtttcccttcgaagttcacattcccttgcctgtgttctgcatattccttttccttgctcagaattcttatataggtaaggaagaccttccaaggtttcttttgccacgcttgcttctccaaacactacaataaaatcattttgatgaagtaattgtgttttttttttttgaggaaaacaaaacatcagaaacactcccattatagaaccactagttgggattatctaccctaatgtatcttctttgtaatactcatgtatcacctctgtaatcaaatgacgaaattgaagatggcactgaacatttcattctatgattgaagtaattagatttttaaccttagtattatttgaatcggttccattttctagccttgagaaataatcaatgtggaatacttaaaagagcagtggcctagtgtggggcattgagttttaaaggtcaaaaacaatagtgtaatgtgagatgcagtttatgagtgattgtgtttgctggtctagagaagtagaaaagggttcatcgaaaattcagaagctagcatatctgatgcataaaatgagttggatttttgtgggtgatatttaaactcatagagaaaatatctacatggctcatgtatttatgatttcagtagaaagaaccttatgaaaaaatacaacaaatatagttttacatttttatgtttgtctagtaaacagaaaatattcattgagcagctattctggatcaagctagataattccaactagataattggaaatacagacaacaaggcacctcatggagtacaatttttaatggagaagacaaatttgagacaaaattgaagtttagtgtgataaatctaaaaactacaatattttcaagatgggattgagaaatgactaatcatgaaggagcctttgaagactttatttattctctctatggaactctaacattgttatcatatagacattcctgaaatttctttgcttttccctacttctgccttttttcccttcaattattcattgaggtctgaggaccaggcactgttctagctgctggaagcaagatgatcaacaaatcccctgctctcataaaatttatattcttatcaaagatatcagcaataagcaagtaaatgataaacacagaaacgaacatatgaacttatattagttggtgttttgtgtatgacagataagagactgggaaatgtgatagtagctagggtaggctttcatacataggatggcaccaagaggcttctctgggcaacatttgaactgcggctgaatgataacgcaaaggcagtcatggcaagttctggtgcagtggagctggggagacattttaggcaaagagaccagcaggctcaaagccctcaagcaggatgaaactggcatgaatcctcttggccagagcataaagattaaagcagacacatggtaagatgaattcagggaggtagggaagtgatcagagcctggagatgtttgcattctttggtaagaagtttgtattttatgagtatcttttgaggattttaaccagaggaatgacaggattctaattgatttttgcattgaaaatatataatggtgtgcggagctataattaaataataaactaattaagaggctattaaagacctctaggtgagaaatgatggtgactttgactagggtgttggcaattaaagtggagagaaatggattgattgaagtggtgttgagcggatttcttgaggaatttgataatggggaaaggatgatagaaagagaaagctcaagagtgtctcctacattgaggtttgcatgctttgtgaagtctatccttgtcaaccaccttcaacccaccattcagcttagtgccccacacagaataaacactccaagtttttgttgaatgaatgcatgtcataatatttattgaagttgatctgaggaatgaaacttggcacataatttccataaatgtagaatccttggatttgcagccactgggcaacagatgcaatcaaggcataaggaaaaaatgcaattattattgagacagtctgtttcttctcattattatgctctgtctcttagagcacactgcctccaggtccgtaatctcctaagtatttactattagccctagggtttgaatagcaaggatgtgtcaagaactttcactagatatgagatttcagcattccatagactaacactttaaccaaagtatctctacctagatctttgggataaaattgcgcttgagaaagatttctcctgataaaactttttgaaagcaattattttgagtgtaaattttagttgttttgaattttgatgtttctgaatacatttatcaataagatacagttatttaaattagatttaattgttctaatttcttatttcaagagatgataaatttagctggatcagtattgttaaatttttgactagaataaagtttaggaggaacaaatcaatacatttctcttaatcatttactatcaaaatgaaataaaagtaaatagttttatcaaataaaacaaatatgagaattaatcatttaaagatagtaataccgtaattattatgtttaaccaatttctacgtcaagtttggtgggaaattttcagtcattattatccaaataaactactctatgtacttaagtgcatgtttttactttgatttagtcaacttggaagacaatgttaaactattgttcaaaacatttttaaaaaaaatcatataagatagcttattgaatcttcaaaatatttatacaaatatttccagttgttatagagcttgttctaggtattctgggaaattatcaaaaagatataaaatcaagattggtaaataaactatgcgcacgaacaagctaagtaatacaagaggacactataaatatttgtatggaaaataaattcagcatcaaagcagtgtcttggggggaaaaaaatgcgcctgactttatttaaaccttttttaaccctttgaactgctgaaggaatttaccatatttgttaattaaggaatatttaccatgttatttttatatgagatttgctaagtctgtctccttatttcatgaccaaatttgtgataatcacaatcactctttatttttgagttcttggttaacaataacattccaaattttaaatgaaaatcttaatgatacattatttggaaattcttatacatgctaaaagccagttgaacattttaaattttgtaaagaaaattcacatgatatacaccgattagtatgtctaataacatctaaaaatgcaacatctataaatatgcttctttaaggtttttctaataccaaaccttaatcagtattatacattataaattgtataatacagtgttaatatactgataatggtaagcttggttttctaagtattatttttctatcttaaaaattaaataaattatgtaaaacatttaatatttattaaaatagttttatgaaacatagaaaaactctgatttgttaagttattattctgggagttaaagagtcagatagtcactagatctttttccacgtgcttttagcttgttcctcacctctttcatatgaaaataaaattacattcttctaaaatttcagcagcactatttgcatagaacactcatttagctcttataaacaaggacaaaattaagtgcacagttttacttgaatgggtacatttagtgataaatttcaacttgtttttcgttcaatcatccatgcaccactaaagatgagttataactttattatttttatgatattgtatgacaatggaatttagttattattgttttaaattttacctcttattcatttttttctccacacatcagaagagttcttaatgtaagtattaaagatttaaaattatattttatatttaattttaaaatctagatactgtttcttcatttcttttccttccccatagttacaattgctcactttgggcatcatcaaaacattgtctactcttaaaaactaaaagttctggtgttgatgttttgcttaattttagaagtagaacttcaatatgatcaatatgtttttacttttcataatggtttatgtagatattattaaagtaataaatatttctcaatgatttcaaatcattaacaaagtaaatatgcaattaaattaacgagcataatttaatattaaagacaattaactattttttaaatatttttgtccttttattgttgctattgatttttgaatttttccttcgatttatgtatttcatgtttagtataccttcagtctatcaagaaagtaaacaataataaaaatgtaaatcaacataaaaaatattgcctcacattgagagaacatttcaaagactttttatcagttgttcattttcccctgtcagatgttaaaatcttttactacccctcatattgcacagaaatgctggtctactgatagtgtcttcttgtagctaagctgtgaagaagtcaaaatttcattttgtaaaggcagttatcacgaggagtgctgcaggcctaggttattggtccttatttagccgacccagagataagatgtctaatttcctgaccaagcttctcatgtgtttatgtaagtctttctctctctgtgccactggggtggggtggagaaaaagagaaatgacccttgttgaaataccaataaaaaatacatactgatgctattcctcagtactcttttattctggatacctagctatcaatacagtaaagtgtgtgtgtgtgtgtgtgtgtttgtgtgtgtgacacacactcagagagagagagagaatgagacagagagatagacagagagagacagagacaaagagaaagcaagaaaggaagacctgataagtacattcccatagagatttcattgaactaaagagagagtgaaaatatcaagctgttttataggaaaatgtagaaaaggtactgaagaaaagacccttaaataatttgatgagattattttgaatggcatattagaatttaatataggccggaaataactgtggtcatgactttaaagtaatatcaacatcatagtatttaagcctaatttaagccactgaggaaaattaggcaaataagtaacagccaagcttggagttttgtcctaaaagatataaatttcactgtcacgtttcctttccttttctcatgctgatctttagattgaaaatacgaggaattacttatgaaacttttttatttccttgaaagctgacttccaaatgaaaaatagggaaatggagaaaatatttctctaaaaaaatttctctaattgcaattaatggaaaatataggaaaaaaatcttatacgctttgaagagcttttctctgactcacagtcttcattgtcttttcctaataattttttaaaagaatgttattgatatctctcctgatttgttttttttttaagtcttaaaacaattttcctgaccagttattctaaaagtaaagtggtttatcggtacaagcaggtaaaacctgaatagttgtctctaatcagataaaaatatctcctacatgtttcttggattcaattgtgattaacttttctcagtataatgtatcccataattagaaaaatatattcttatcattatttaaagttaggcctagccttgtatatttattaactagaaaattttatttgattcataaaaataaaactaacagtgaaatatatttatatatgagttgatataatcacaactaccccaattattttaagatgctaaaacaaatgcaaaccagaagaggttattaaagctgtagtcatagattatttagatagaagcatttttttcctaaatctatttccctaaaggggaagggagctgaagtatactggctgaaagcctactaggtaccaggatcctttaaacatgtgaacacattagctaggtttacgcctttcagttctccccaatatctctttcttcatcagtagcatacatttttcataattaacataattaaggtatatatttattcatttttattttcataaatattttccagttacttttactttggtattggagagccctttctaaattccttttggtggaacgggagttagtaaatagtaaatttccaaaagtgtcaaatgaatatctgaaaaattaaaatgcatttaatttcataaatatttctctttactcttttttccctctccctagtatttctgaaattcaactaaattcttaaacagataggaaatatatctttttcttaaactctcttgaaaggttagattttaacaatatagtctaataatgcaatgtatttgaaaaccccaaagaactattgccagctaaaattatcttttcaaaatgatggaaatctaaggatgtaacaagtgtccataatggaaccaaggactttatcattatttggttatcagagaccttagaaaaagtagttcactaatatcattagcttatattctgctttccaaatgaaagagagagtgaacattgtaatagtaagaagttattgaatgcctaatatgcacaagacacagtatagtatgcacatatatatatacacacatacatgcacatgtatatacacacacatatatatgtgattattcctcaaaagaatgatataaaaatataatatttattttaagaatgaggtctaaatactcaatgtgatggaacaggcattccaaagaggtctttgacctgtgagcctgtgtttttcattttgctaccctgtttagagaacaacacttccgaaaacaaacagaaaatgacaacattaataacaaaattactcagagcccttaaaaatcttacttctatttcccagtaatgtcatctccacagatgtgtattgggaactgatttttttatctattcctttgcttgcatgttttaatatttcaggagttaacaggccaagtcctatttctgagttcattaaaaaaaattgataagctcattatgcaaattaaatttattagacagagttttactttgtgcatctcatatgagattataaagtttcagaattcattctagagggcctcatccatagttgtacacctcttagagatttgccatttgagtttttcttcaattctcatatacttattcaaggacaaatatctcttctttataaagttatgaagacctccttagacctttcttcaataggtgcatgtgaacacaatgtatttgaaatttggttatgttctgaaatagtttgaatgaacttatatttatacatgcatgataaatataaataatttaataagacataaaatccaaataaatttagtcattgttaaactaaataactcttcccgaaaagttagaggaatactctcctcctaataagatatgtgtaaatgttcatattgacagaattcctgttgtttagtatctaacaagaggaagctatctacataaattataaaatttttcagaattatctcacttttgatatagttatatatatgtttttctaactaactttccaccacctgccttctccatctgtcctccatcccttacgttgatcataagaagggaagaaaaataagccgggagatgatactctaaatccaacttagaaattatctttagaattctttctttcttttactttatttggaaggaaataaaatggaataaaataaaaattatttttacagatgaaagaaatctgaggtctttacctttctacacttattcaatatgcatttattaaatattaattatttgacatgatgtcaaagtattagtttctaatattaaggatatgattatcttaattcacaagatgatcggcaaatgtaatttgcttgtcttttttttccttttgcctttatgaaagaattagaggtctgtaaattaccaagagaaatgagatgtgaaactgagaaggcaagtcaagtaggcatgttagaggcaactgactactttaggcagggctgcaagctcacttcttccactatgggttctcggccaaccctttttccttttctaaaaagaacaatgttgtaatctcgtttaaaagttcaaataacttttttttttaaattagtgtctttgtccttgtccaaataatgtaatgtaactttcttttaacaaagaataagataaaatgttttaaaataatcattaccatgtgagttagtaaactgtagaacagacagcaaagagtacacaagaacaattatgaaaacatgctttctctttctgcaagtgcaatgtgacctctgaattgatatatagcaataagagagccttatttgtggttccatgctcttctagtaaaacaagtaacattaaattttctctagtgttccaagtcatatatgtccacaaagcattacatattttcaatgatggtgttgtgttactcattcatacttttagtacttcattttctatcttcagtgttcaattattttgtgtttatttcatatggcatgaaaggtcttttaatttgatttagataagacctttcaaaaagagaaaaagccaacataatgcaaatatcattttttaactgctacctaacttgacaaaaaagatctatttatgtaagtatttttctttatcaattaaagtttattaatttgactttcattgcttacactctaatggccattttcctaaaaatactatttcccaaaatgtttgttttctacagtatcagttactttggatcttatctttggcaaaaataaaaataaaatattcacaaacaacatggaggttgtttgaaactttatcatcttgattaatggtttaaggatggtgagttgttgagtttgcacttaaaagatgaatggtgatatacagatgcaactggattattccatttgacaaaattatatatgaaaaagttatctgaaatctttagtgaatattctccgaagttattttccaacagcatagcacaagagagagaatagaggcctggtggcaggtgaacctgggtccacattgcagttgccacatctacgatttgtataaatatagaccaataaaaactacccaaatcagctgggcgcagtggctcactgtaatcccagcactttgggagaccgaggcaagtggattttgaggtcaagagatggagaccatcgttgctaacatggtgaaaccccatttctactaaaaatacaaaaaatagctgggcgtggtgtcaagcgcccacagtcccagctactcaggaggctgaggcaggagaatcacttgaaccagggaggtggaggttgcagtgagccgagatcgcaccactgcactccaggctgggtgacacagcgagattctgcctcaaaaaaaaaaaaaaaaaaaacccaaatcacaatattgtttgatgtactatgtgaaatcacataacagtaacattaatacaacttctggcacataagaagtgctttatttgcatttcccttaccatgtgttaccatactcccagtttcacttttggtaaatatatacatttctattatctgttatcaattaaaggtcccgtcttaatgcatagttgccaattaacaaaattcactagatgtgagatttaagaacattctgttttaaatattctctaatattaataccattagtaatgatactaatttgcctatttttaatattaatattaatagctaccttttatagaacatttagtgtgagacagtactctgttttgtaggtaggttatctccaatcttcaaatgacttgcaaggtggaagttattatctttagtttccaggtgaggttctgaaaggttaaatgacttgtctaggtggacacaactatcatgaagggaaactgatgttaaaatctgtttttccggcccggtggatcacgaggtcaggagatcgagaccatcttggctaacagggtgaaacgccgtctctactaaaaatagaaagaaacattagccgggcgtggtggcaggcgcctgtagtcccagctactcgggaggctgaggcaggagaatggcgtgaacccgggaggcggagcttgaagtgagccgaaatcacgccactgcactccagcctgggcgacagagcgagactcagtctcaaaaaaaaaaaaaaaaaaaaagaaaatctgtttttccgtttctaaaatctgctttttcctgaagcagtgttattccttgaagaaaacatatattccatagttgatgaaattaacctgtaaataggtgaatgtattgatttgaattctaaactgcagtctcatctatagaaactttattttttacacttgatatattccccggtacgatcattgaattattctaaacaactttttcttgcccttatgtctgaatgaatggtatatacggtgtgtcatctttgaaaaacacaacaacatatttctttccttctatactaaatctgcttgaaaactaattgaaaatgttggattattctttctcatttttatcagatttgtagattatcttacattcacaaaaatctcatggacaaacatatctacatttgcataccttaatcattgtttcccataacattgttatcatcttgaactgttatatggttatatgcctaagagttaagggattctttaaaaaaaaaagtgttaacaaatttaccaaggacagttcaaagacctttgtcattttttttttattagtaacttgcagtttcatgttgtttgtttagtttctactacctttttcatccagaaaaataagtaaaagccaatatagcttttgaaatggaaaaattgtttcaaatcattggcaaagcttaatgacttctgactgctgagatatgttaatttaagccagaccaaatgttcctcagctgcaaatatttggtgttgttcactgggaactggcaagatttatgagggcccagtggcaaagactctgtgctcatatccctctcattgtaattgtttcccatgttcaatgatgaaggaccgatagggaagaaaataccaacttttcaggggtggtcacttagactcaaataagatgctatttcacatttgatttactatggcatcctcatgccatcttagttatcaaagccctttcaacttttctactccaattttgggaaaatacaatctgttactatccaagttgctccgaagttgcaacgcaaagaaggaaatgacttacatttggcaatttgtaactataagatatgcaatggtaatttaaaagttatatgagtaatgtgtagtacaaatataagtataatatgcttatattatttttaacagcattttaacctctttttataaattagttgtgatgcattcaagaataaccaaagatattttaatttaaattaaattaataatttaatcattatttactaatttaaataattgaaataatattaaattgatcttgcaaacatattgaaggcaactcacattctgcaaagacaaaaagtaatgctgttaaatacacatgaaaatttatatttatgtgataatcatttactgtttagaagtattaataattgcaagtgtttttaatacctcttaaagattagatattaataacagaaataattccaaatgaatataatatacaaagtttaagctttccaacgaagaactgagcctagggcacattctgacactgaaggagacagctcaggaagacttcactgagaagaaaagcaagtcttaaatgtctaacaataattcagcaaatagctttgtaatactagtgcagaccaccttgctcttacataacagtaaagtttattgtaagcattctttgtattagttattatacatacatatatatacctatatatatatatatatatacacacacacatatgtatgtatgatcatggcagaacaattcttacttcaaaatgattgcatttaaaactaagtcataatcaaacctgtatatagtgcttattatataccagatgcaagtttaaagttacatgcactaattctctgagttcaaaaatgacttttggaagtaggcactattattatttttcccattttacagattaagaaatagataccagaagatatttgtagtcagtatgtgtgctcttaaccagaatcctttatgacttttcaacttccgttgtcttttaggaaataggtcaacaattatttgcttccattacaatatgataagaaaatggaactgccagtgaagacagaaaagaccttacatgtttattcaaatgctttgttacataccctgaatttttatccatataaaggcacagctggtaaaatatatggtatttgtaaaaggatgaatgtatttgcattttgcatgtaatatcacaagactctatgtatcgttaaaagagtcagtctctgcattattccatattgaattccttaattatgtatctctgtataataaaaggaaaagtgctgacagaatgcagtagaaaaatctaaattcttttcttgcaataaatgtgacacagattgtataaagcaatatttttgcccttgaaatgtttagaagcattgacattctgtccactaaattgtcagcttgtctttaaggttagagcttctaagttcttagcatttaacacactgacattgatctcttggttcttcaaacttgtatatcagcagcagtctcgacttgattttgaagcagagcattaaaaatgttatccttgatggtgatatctcataatttccatctattatgctaggatttttgaatcaagtttccaatctttaagcttcattccaaaaatactattaatcttaaagtttttgataagcttaatgttagaaaatgtcttagttatgaagaaacagtgaagtagataataaaatacaaatctaaaagctaaagtaactaatcggttccagcctgacaaatacttaaagaaaccatttgaataagaatgtccacaacacttattattttgttttgaggacttgggtagtcctcatgtcttcaattactttcccaagattatgggaatatttccaagaaaaaataggcatacacatactctttatttgttaattttgaatttgtgtctgtggggaaaataatttatattgtttaaaataatatttattaattcttgacaataacgggactttccagataatgttttcattaatccattagttggttaaagaatcacaaaaagaaatgtcagtgggatttttttaaaaaagatttctttgattctctccacccacaggctctgagcaaggcagtaaatagtccatttttgttaatgaagcttccctcatacagctgggattgtttaatattttacgagtgttactttgttttgctctcaacgatctcaggcagttaaggatttatgaatcgtgtttttctcagcccatctgcggtttcctatcttccctggccttgagaatatgtttaaatttattaaagcgaagcaaaggctcattatttcaaaggagagccaaagtgacacagtgaattggttattaatggaaaggcactgccatagggcgattgaaatttaatgatatcctacaagaaaaaaatgagggtgtcactttccaaaaagtcatgctaaatgccagcctttttaaggtcctgccgctaattttatgcctgcgcacagtaatgttttcaaaagcgtttaggaaacacggaccagtgactgtactgattatccttttcaccttcgcgcctgttccaaatgggtttgtgcagtgagcgatttaatctctaaatatagggaacgttaaaaaaaaaataacattgctgtttttcacaagctaagggccttttgcaatcctccggagatggacttgcaaatatgctatctccatatgctctcagtaagctctcaaactggcggatcaccaaaaaagaaaaaaagcaatcccttcattttttttatttctgtcattcaaaagatgttttaatgtcatagtctacaaactatatttattaatactcagctaacattcagcttgagctacaaaatgggatttgacgtaatttaagttttccttatttaacttaggctcttcattgaattacagtatcgaaagaccaaaatgccacttcatctcgccccatttaatgcaaaccagagatgcctatctattaaaaagcacactttgttgatatattgaatcattctttttagagttactgactcagtgatttcctgtattaattgaaatatccataaattatttttaaagttatctcaaattcctctagaaaaaattgttgacatgataatgtagcaatcatgcttcaggacattatttgccatacagatttctgaaagcctggttttcattttacagcttttgctttatttgaattattctacaagtgtaatcactgtggtcctaatgtttttctctgtatctctttcaaatatgttattgaaatttgaagagaatcgccaggaaatggcacaagttaaatttagggttttagttcaattagacttgtgattcagcaatttaagcaatgtgttaattacatgaagtaaatacgaacatttttaatgcaaaaacagcattggatctagttttaatgcatctttacttgctgaatataaactaaaatgtaaatggtgcatttgacatgcactgtggtaacatataattttcacatactgcatatggtaaaattaaattgtctactggtggcaaacagtttttggaagtagaatagaatgagttctttttcctgtttatgacaaaacacgttattcgagaatttatgaaattaatttttaaaaattaaatttacactcaattcagaattacattaataagattttataacttgtgatcacacattggggaacttttcatttattctaggtcagagtgtgaatctgaatagatgagaataatgttcaaatctaagagacagtaatgcatcttgtaggagaaaaatcacttggaagagggtgtcaaggacccacagtttaaatttctctaggcccttcctctctttttacagtaaacttatcatcctataatcttcctaacaaagacataaacactttggctacatatattttgattgtttcacgacagtttactggaggctgagcaatgacagatttcttcattgtcttttagccaaaatttgtcctttaagtcatttttgttgactgccccttttagcagctcacctcacaatgagagagaagacaattaatgggagggtgatttatcactgccaaaaactgtcaaggacttcagttgtagctggagaaaaagcaatttcacattatggcatttcattctgaatacattgtatttacagcacacagttttattttcagagcctattatcaggtgaaacagttgcatctgaaatgttgtttgtgacataggtgacctgttaggatttgataagtatttacgccagagcacaaggggctcacacatctgctgttggcagaagcaatggaaaaaaataacctggaaatgaggcgtttgatttttctggttcctacactcgagcatctgttgctataattaagtggcattcagtaattgcagagcaatggtgaaataaacatatgcattcttgccagcttttaggatttggtgtccttacagtaggagagacaagcaaagtaacttcagtaagaacaaaaggttttgtagcaaagtttaacaattaacttttcgataaaagagagaaaagaatttcacattagaaaacaatttcatcaaaaagcgaaatagtatacagttttagaagaaggaagtcccagaaacattcaacccttggaataaacttttcatctgtatggatgtcgaaatgggttaaactgtcattcctgaatgttatattacaggagagtaaaagaataataaaaatatagttattactcatattaatggtattgtgccatgaaatagagattatagtgaaatctgtttaataaactgaaggttgtatttggtgagttataagaaatcaacatgaatgcactggaagtgatcctccctcctcagcctccagagtagcagggactacaggtgctcaccactgcgcttggtttggaacttgacttttaatagcagtatgatggattatttggggcgaaagtagtgttctcatcaaaatagacagaaagcgattctcaaggtagggaggtgcggcgtggtggtaggaagggctgcagcagaacctcaggtttttttgatttataatccacaagtctcaaccctcttcccccagtacttctgagatctgaatctcaatgtggagggaagagtttgaaaaagctacccagtgtcttctgaggtgttctcattgccactcaccccacattgcagagaatgttttgcctgtgaaacaaataatagtttatattagcaaaacttgaaagctctctgcttatgaatactacatccacttactaaaaacaattctttgattaatatgctttatgttccattagttattcagaacaatccagattcttccacaaacagagtagaacaatttggatttggttgttatactgtagtagtttgcagtttcctggaaatgtcacatgacaaattccattgtgctataaatagttccacaacaatgacttttgaagtgaagagaaaatgtgaaattcaaactctattgaaatcgaagttttagcatatattgttaaagttgaatagttttcattattattagtatggacagtatggtgtttaagtagataaaggtacagttacaaaggtgaggctcttcgtctttaaaccatttgagagggaaccatgaagcttaagtatggtgtagaggctgaccgcgtaggcgatttggcatttttatgtgatgctctgggatcaggtgattactttactttctgggtgaagaaaagacatgaggaatcacccatgaagagatgagaatgatagattatggcttcatagtgtcaaaaaatgttggacatctgcttagaggaaaccatataggaataacagttgccttgcctttgaaagactgaagaatcattttgaagttccttttttctttcctccaggaggtggttttaaaatgtgttttaaaataggtttaaaattttggattcccattcaagcagtattgaatagtagtgagatttagacctatgttaaacctacatatatttatacatctctatctacatccatatccatattcatatgtgtatatttttaagatgacaaaatcataacctattataaaggggacagaaagaaaaatatggtccctgccctccatttgctttcaaaaggtatagtattaatagaaaactattacatgcacacactatatgccaaatattattctaaatactagaagtgtaataacttagtcctcacagcaacttacaagacagctgcattactgttatctccattttacaaatgaagataataagacagagtccaaggtcatgtggctaatagatagcagtcaggtctgggaattgaattccagcagtttggctccagagcccatgctctttgccacaatgctattcacttaaaataatgatgaatacagacatgttttctggacctgtagagtttagagcttaaaagtgatgtagcttaaatgtatgtatgctttataagtgggaaatatagtatatatgcttacaaattatctttttagcctacatatctgcctactaacttaccttctcacctaactaccataatactatgatattattggaattaacactatgttaatattgattttaaatttccctttcttctttctccaatgcaaggatctttgtactttcatatacttcctgatatcaggcacacaggctgctattgttaattcaatttccttttaagtctaactatctcccttggatgaactattccttgattttatatataattgtctataattgtataacatagtttttttgtgtgtatagttcaatctatactgtctatacttaaactatttattttgattgtaatcaataatttgtccctagcattttattttttggtttacatactagattcctggatccttattaacttgtccttctaaacttacatatgattatctcctttaatttttttctcaaaagtcttcattatttcaccttccctaattcttgtttagagttttggggacaagcttcaatttattctatatttaatctggatagtctaaaataattgcaatagcattttacaaaaatcctgtggattgaactgtttcttcatttccatgaggtttgatgctctggcaagagtatggcattattacacctaattcttaccataatcttctgaagatggtaccattttatctctgttttaatgatgaggaaatctagatcaataatgggatacaactgcccaagactcagagtttaagaatgacaaaacatggaagaaacccaaatttgacttcaactagtgcttcttctctctaagctgccttatactccagtggctttggacttgttttgtttccatttgatgctaaaattattttatatatggaaattttagaaaatataagcaatggcaatgtggtggtgaccatataaatttgcttgtttaatggtgtcttgattcctgttcaaaggcttaagcctgcacaatatatgtgctatgttagttaggatatatatatatatatatatatatatatatatatatatatatatatatatacactactttggtttggacacaaacatctaaacaataaatgatctgaaacatttgtggtgaagtgttatttggtgctcagaattatttcatttattaattttcagtgtgattggtgtttctttaaagaaaactttagaattcattttgtacttatgttgtatttagatcagtttattaataaaaacattaaaaatcttaacaattatatttacctaagtaaaattactgtaaacaggagagcataatggttgaaaacatgagctctggattcagggaaacaagatttcacctttaacccaattacataatgagcatgctattaaattgtgacatttattagctctattaatccttgttttataaatgggaaaaatgggaataattttggaaaaatggtaggaaacctgcctaatggagaagttctaagaacaatttaataatgtagacatgggtaactattgttcctaccatgtttcatcatcatcaatcatctctgcagcctatagccacaaatttaccaacagattaggtgccaaaaactcacttgtgatttgtttgaaagtttaaatactatttcccgtcatagaataacattataaatataggttagagctaattgaaataatgctatcagctcattagtgatacactatacatttgttatgggttaaataggctctctggagaaaccagaactagactatttagaatgattatgataaagggtgctactaatcttattgtatagaacagaatccagcaatttttttctataaagggagagatagtaaatattttgggattattggacacataatttctgtctacacaactactcaactactcgactctcctgttgtagtgagaaaccagatgtatatggtatataaatgaacaattgggactctgcttcagtaaaactttacggatcttgaaatttgagtttcataaaaatttcagatgtcaccaaatattcttctttttattttatttttttcaaacatttcaaaatgcagaaaccattctttgctcactagctgtacagaatcaggcagcaggttggatctgacctatggtccatagtttgcctacccttgttctaaaatatgatttctgtttcctctaaactttcttgttccaaaatattttatttcagtcacccctgtcagcctctcacctctcaggtatctaaaaggttcaaaaaaattgaaaactgattatttttacaaaaagcttgaacacacatggactaagacagagtgttagtaacttggaacctgaatcagaaggcccagaccccttattttgaaagcaaaggaaatcatctcatacctaatggaattgctataaaagacacatgaaatgatactttaagtaatcataagttaggtagcactgtagaattgggagacagaattttactatattagtttgttggagtcatcataacaaaatgccacagcctggatgggttaaacaacagatttttttttttccacagttctgaaggctagaagttcaaaatcaaggtttgggtagttttggtttgtgctgaggcctctctccttggctttccagatgactgtgtcctcatatggcctttcctctgtgcatgtacctccatgatgccttttcctctttttgtaaggatatcagtcctaatagattaaaggtctcacccttatgaccttatttaaacttagttacatctttcaaggttctatctccaaaaatagtcacattgggcattatagcttcaacacatcaatttgaagggacatatttcagttcacactagtattacatattaatgattaaattgtccattaaacaaggtaggttaccaagctgaatccccttagatatgacagaggtagagtagttggtgttacaatgaggatacattttataatagcttcttcagttaggctcactatttaaaactgaggttatttccatctgagataaatcaaaatagaatgaattatattacactgaattttggttggactaatttgtttttgtatttggtataggaaaataaagtgccaaggagtaaaattaatttgcttgatagagattgatttttgacctgagaaaggttagactagcaaatgcttttaactccaggaataagaagcaatgcttcaggacgtctggttgtgctcatgcaggagactttggccaagatatagagtatgtttcccctaatgttttctacttcttatgacttcctttccagtgaacattggactacttatttccttaacgtttatttggtatttatcatgtgcacctttgttattgttaatttaatccatgtgtatttggcttctaaagaccaaaatgtagtgaaagataatgtagtctagaaaaatctagaagttttacaaaaaataaagaaataaagtccacacacaactacgaagactgacaggtgtttaatggacacacattcataatcaagctcctgttgacaaccattatttgaagattcagttatatagttaatttctttcttttaagccaaaaagtggcagttgagttaattttgtcaataatgtgtagattcatgttatgggatgtagtttgctaagaacctagtggaagccatataagtaattttaattgagatttttacaaccatttgataacagtgttttgatcactgtagttagggcaggattccaacagtggccataaaatctgtgactaatccattgagtcacccagtctctgtcatatattgtttaatggcgcatgctaccagaaattattatcactttctagtgataatttttaagaagagaaactttgtagacacaaaagatgaatataagttgaaaacttacgcttataaagacagttaataaaacatcccctcactaaggtatatgagagtatactcatgtatttataatggctcttaagtctcaaatcatatatatatatatataaacataaaaatatatgtgtgtgcatatatatatgtatatatgagactgatgaatattttaactttccttggttaatgtttgtagggcacttacagatgctagaataatctctaatgtttttgctcaatctgctctggagatggatgaaataaatagtttaaactaattaatgtaacaccagctgttacaagtgcttggcagacgtctgtgcgttttgatgggcagggagcggctgttgtacttgactttattttagtacaatgttgatcacagtgtaagctggaataaatgacaagccaaaagaaggaacagaggatgaatttcatgtaatgaaaaataaataccatcttctttttctaaaaatatatatgtgttttaaggtgggggagagagactgttgggctggacttcattaagtcataaggcgtttgacagctgctagtttaaacatgctgctaaaatacaggtacgtgatcttggacactgtccttgatttttccaaaggacctattaaagttgcaggtatgcagtgtcagctagatgtttgagaccctctttctgctaattagacgcctttagaaaaaaaaataaaaggaaagatactatagtcatccagacaagataggggaattattttaattgtactatttgagcaagtggaatgggaaaatactgggttttatggcttggtgattatgaatattattatttttaagtttctacaaggtatttgcatctacttctgtacatctaattccctcatggaaaaaagcaaagaaattaaccgccagcaaaatctgagctctcttggtccactggaatggaatggaactgcctatctccttgtgatgagggtttctttcctcatcctacaatggataaaaatcctcctaccaacgtgcttattgtttccataagcgtgaagtttaaatagcctcctaacttctttcttaagttggagggcagaatcattgtgctctgacagagaaatagtggttgttatctcagtgtgtgccaacattaagataacagtgtcattgtgcagattgttaccctgtgaatttgtctaataagttattacaacgtgtgcagagcagatggcaagtgtgctcctgaaagaattgatggataggatatgatgtcatcagtgagatgacaaggttcacaaggtacttgacctccaagaataagtcctaactggttagaattctaaatggtgaactttggtgacactagctaaatgggaaatatgtgcaatttgtatttctttatggtggtgtttaccccctttactgaactccacataatgggattttgtccctgaagactcagagatattgttggagggttgcaccgtgtaaccttctgaggatttcaaatacaaatctacacatctaaactttaacaaaatcatagcaaatgttatttatgaagtcaggttcagagctttcccttttttatatgtatatatgcagaaagaacatagttaagacatcccattaattttaacatgttatcacaaaatagcaaaatgctgactccgtgaaaatattcagtgcataaaattaaacttttatattttcgttggaatatgtttctatatatacaagcctaaaataagctgtcagagatcctgatgttgtctttatattttcattatgactttacttgcacttacaggggacagacctaaacacattaacatttttacttcaatattatcttttttaaaaatttcaattgacttcagaatctcttccttatcacctatgagttgtgatctcaaaatttacattggcctggaaaatgtattctggaaaaatatcataacatgtgtgattaaagatatggtgactcaaaggaaaggtaggcaaagtgtgatactagtatatgtgcattgtgcaaaatcaaataaaaaaacctaaccatttataattgttgtgtgggaagaggttgactgattaaaagacatgcccaagaagaaaacattgtagatttattaaggaaaggactaagcatcaaatgcatgaacttccatctgctaaacattcttgacatcaaattttacatataagctgacaagaattctaaggtctaacaaaaataaattaccctaagtgtggtgggctgcattatcctttttgttcattttgaataactaagctgaagttataaataggcaagagtttttttagagacaagtttcatttcattgaaggagatgaaagaaatgtacacatataactctgtctaacataaaggatatgcatgtttttgtggcaatttatgaaagaatatttaagtccttggaatagtaatttcattatgaaatataactatatatatctatatatacacaattggtattaacaaagttatagtaatagtaattttttatcaactgaatgaacttgaagataaattaccctacaaagtttattcatttgataactttacatgaacttgtagtagcagaagatgcagaaatatagtattttaattcattcttttttatataaatccttactaaccgtaaataaagttctgagggtttcttaattactttacattgacagcaaaagtttagcctatagttgcaaatgttatagcaatgaattaattttagagcaattacttggtaatatagattataatttagatttagccttatctatttggatatatcaaagcctatatgtttaagccacttcttagcttatactatcatgtgttaatattgcctagatgattagcataattaaacagtattctgtcaatgtatatcaagtgatcaaaggagcttatgaaattatttgataaattattcaaatggactttttatttttaatataaatgagataacagaactcatatttcataccacattgacactcagtattgattatatggctaaaccattttcaggagctgcctttacttaatctgatctctttttctgtctgaggcagataaaatattaatacaaggtaaatgagtgttcactgaacttgccatatggcccctgtggaggacagaggggcctgggcagcctatggacttgccatatgggcctagagggaaaaggtaagtattacacagagaacaaatctaccatatggactgggtggagcacttgagactgtaaatactttcttatactggagcatgttcacaaaagaataaaaaccacataaataatacattatacaaaacccttgaaaatggatcaattgtttagatttaatatgatgctttcaagcaatgtccagagcatataaataatcatggtttactttgaaatggcaaagaggatcatcaatcatttacccttgacatttttacattgcatttaacatctgttccataatagcatggtacagtaatatacttaacatcatattacacactgaatctaaacaaataaatataatactaaattagagtttctgaatgtttgccttgcttctactaatatttttgcaaatactgtattatctgcccttttcatcacttgaattttttgttattatatagagcagatgaaattaagcaaatggcaaaagcaattttcttggtacaatcaaacctcattaatttggtttctgctaatatggaatttatgataattcagcttgggcttgataaagtttacctttgttctagatataaagaaaagatttgctaagccaattattagtataaacaagatgacaatgagcatgtttaacccacttaagagagcatacttttaaaggattttagcacattaatggaatgcaaatacatactgctaataacaaatgagtctaatttagtctttgaaacaggtcttgtagtacctgtatttggtagcagatggttccaattactgtatatatttctaagttctgtgcatatttctttaccgtgtctattacttatattttgtggaatttaagcctactcattttcaccaatcactatcttattttagtctctaaagcatctatgtcaattattttttaaatgtataatctttttaaaaatgtataatctttaaaaaaagattattcttctagattttcttccaaggtatataccttgattcttttgtgggtttcttaaatagggttttataagtgaaacaacaaaaggcctttaagaatcaatttagacacacacagtttggcaactatggatgtatttgaaattgtatttcaagttatttgtgcaattccttatagccaatttacacatgaatacattaacatttattcatacaggagtttgatatgttcaggatctgacaacactatattgaacactttgagatccaagaaaagtttattaaaggccaaaattatccaaatttttggagtttattggtctactggaccaaatatttgtgttcacgccaaattctttattaagaatttggtctttactcagtcttcagagttgacattttactttctcctctgttttagtattttgctttccttttgtgttttcctgttatctctacagaaggacattagagcgtctccctctgttcccttactttttctcctttcatataatggtacttgttaatccgtgcggtaaaccaaagggaaatttatagtactttaaattaaaagaatgtgtagggcagaggaacataatgcagagaaggctaggcagtatgcagaatgccaacaggtgggtgccaggaaaatgggttatagcaggaaatagataacaaatgaaggcctagaaatagaaggcaaaagtaaagtttcaaaaaaaattggtatttgaatgcattaggggatgcttgaccatggaaagttgggttctgggttgaatttccaaaaaagaaatgctgaaattggtaacataagaagtatagacctagggaaatgaagcgttttgagcatggaaccaagacacactttctggtatagaatggacctcagttacagttttaggaataaatcctgtagggaagcaaggcagggatataattactagaagcaggacccaaggccagagtagatcagtaaagacaaattgatgctgagtttctgtttgttaaatctcctagcttaatatgccttgtattactccttctgctgaaacaaaagattggtttcaatagttgctggcagttggaaatctagttaaaggctaagtggcatatgtataaaggcaaggaaaagaaaggtaatcattataattttagttccatacctaagaggctagtaaggtttgttcctttcctttttccattttttaaattttatttttttaaaaggaataaatgtagacagctgtgatagccattcaatgctcttgaattgagtttttctctttttactttatgttttgttttgtttatatttccatctttcccttaattagaaaacaagtaagaattttgggctcagggtttctagtaaataaaacaaatctttatttccaggggaccattatcaagcactcatattttcctccactctgtattgtggctccattctagagggtttcctttctaatttcctcgtttgtttaatatcactacattttttttggctctcagcacataaatgaggatttttctatttcacttgtatttcttcctcatttcagtttcctcacaaattcccacaaatttttttctcaatctctttggaacaagagtgcctaaccagtcaataacaaggttataaatagtagttttctaaactggctgccaccaccatgctcatctttcttccatactcacatgcgtgtcatgtgtctactctgtaaaatatggattgggatgtgtaatggacctcccttgttagtccttgttactgttagcattgctcctacaagaattccataggcttttacaagcacataacgtagtgctgtagaaaaaagcaaaaacaaaaacatagtaatgaatttgtataaacattatttcaaattctggctctgttcctgtgtaatattaggaaaattactcaatctctttaaggttcaggtttttttatgatgaaaaggagataataattctatgcaacatttttgtgagagttacatagaataatgtgttcaaagatctagtatagagataaaagtattttactgcaacatttaataatagcaaacattttgaaacaaactgaacgttgcaatagaggaaggcatgaatgagataaaacattgctgtgtaatggaataccattcagcacttcaaatgaataaatagatttacatgaatcaagccttaaaacacagttttgagtctcaaaaacataatgaaagttgaaaaaatatattaatggcatgatattgcttatttaaatttaacctaaaatatgttcaatgtttctcatagttgcacacaaatttggataaatctatgtctttgtaactctatgaactagaatgtcacactaacgattcatcttgttatttgaccctggaaaggaggggaatagaatgggactgagattaacaaaatgataggaggaggtgtgggattggataatgaagtgttcattttttgaacattttttttaggatatctattagatatccccgtagagatgtgagtccagagatgagggcacttcaggcaaaaggtctgagctaacgcaaataaattttggaggcatcagcatatagatggtatttaaaggcttgtgtctgaatgagatcattagaggattcgtatagcaaagagaaaaggtcagaaggcacctgttatgtcttaagcttaaaaggactagataagaatgaaaagcgttaaagagactaagaagaagctgctattgaggttttgggagaagaagaaagaatagtgtcctggaagccaagttaagaaagggtgtcaagaatgaagaaatgttcaatgtgtcaagggcctctaataagtcaagtagagggaggtctgataattgaccattggatttggtataatggacatcactgttaactttgataaaagtagttatactagagaactgggaataaaaagttgactagaatgagctcaagattaaattgtgaggaaaagataaggtaacagagtatagttaactcttgaaaaagaaactgaaaaactggaacaataattagaaggaacgatggtatccagggatgttttcttttttccattagatgggatataatatagcctggctatatgcaattagaactatttagttaagagcagaagagtctgtaaaagaaaggtacaattgcaggagaaatttgaggcagtacatttgaggcagagaagagaaggacttactgaatatcattgttaatatttggaaaaaccagctctaggacccatattgaaaaacttagtaaaaatataagccgactgtttcctacagaattttaaacttcgtgtttaggattgtatttcttctttatatttttaccacctctttgactccttcattacaatttaagccctgataaccttgtacttagacatattatttgtactcttaatttctcacactagttgtattcacctttcatctattagtctcattcctaattttttctactagttatattttatatattcttcatattgttatgagttggttttaattcacatcctttccagtttctgatctgtttcatgaaagaatgtttttgagtttcactgtacctagcacatttcattattggactcagttgataagattagtagagacagaggttgtatcagattctggatttctttcaaaatcatgctgaaagtttgagaattcagtttataatgaatagagagcaggcaattaaatcatatattttattaatgagtggagtgaggtgtggtagtagaaagatcagtcaaaagcaatgcacctgttaaggttaaatatactaatagtacatttatacaccctggtgtagggtgacagttgaagagaaacacagaaatgttaagaatattttgaagggataatttggtgagtgtatatgtgagaagaaaagttaaatacatcaaatcaaagctattcttagaataatttcaaagatggtggtatcactgcgaggaatagagatgataatagtgaaatgcatttggggaaactaagttttttatattatttttaatatgcttagggtgaggacatgtagataaactcaaactacagccatgtaattagttaacaatattaatttggccaggtgcagtggctcctgcctgtaattccaacactattgggaggctgaggcaggaggatggcgtgagcccaggagttcgagatcagcttgggcaacatagtgagaccttgtctctacaaaaactaaaaaaaaaagttacccaagttggtgtatgcctgtagtcccagctccttaggaggctgaggtgggaggactgcttgagcctaggaagttgaggctgcagtgagctataatcatgctactgcactctagactgggtgacagagcaagatcctatctatctacaaaaaaaaaaaagtaatttttaccacattcactgtttagatctgtcttccatgcatataaaatgatactaacaagtacaagttattcttttgttttcattatctttctaagagaaaataaaaattgtgagagtaatcatcatgagagggaacagaagcccaagtcagatgaagaaacaggacgaaaatacttggcaattcacaatgaattcaggccacgtgaattatatcacaagatatttagactaaatttacagtcaaatatgctgacccacaaaagaagtgatcagtaagtaaacgtactaatatgcagctatgattttttttaactggacagaggcacagttcacttgcagtgaaagaagtgcctccataatgaccctgaagaagattctaaaatcattccttaaaataatttcttagaaaacatgagtgcaatgactaggatttgtatgggctcatcagaaaagcattcttttaatctaggctcattttctttgcccaacagagaaatgaggaaataataggatgaacagattccagtaaacatttatagaatttttatgtttaattgttagcaataaatagatgatagacaattagaaaatatattaacattggcaggactaagcctaaagtggaggttcagtttagaaatttgataataggttgagataataaattatatacatttccaaaagttatgtattatctccatatattaaaaccttagccatgctgtaagaattgtgtcctgattatctttcattctggaattataattgttctcttccaggtagtcagtccaaggatggactagatgtcctcacttgccgtgacagttcctctgtcttatctttgttagagtattttctatacagtgttgcatttggcattcatccataaatatttctagagtgactagtttcaaatttgtctaattttccagctgaactaattggcaaaataaaatgtattcatatttcaaggttaattgcatttcataaaaagttcctgattaaatttatgattaaatttaacaattgtaaaaatagttttgttagtgaaggaaataacaactttcttaaaagtatcatgagatttttgaagttattgttataggaggcactatattaaaattctctgtggagaatttctatgctaaaaaacaaagttggggaatagattttagaatacattataagataaacaacagagaatactatatttatgaggattcccaacttaaaggaagaaacactaatatgaatgatctcctgtcactactgcatggatagatcggggatgtataagaatcttaagatgagtaggttgcgaaaattttctcccattttgtaggttgcctgttcactctgatggtagtttcttttgctgtgcagaagctctttagtttaattagatcccatttgtcaattttgtcttttgttgccattgcttttggtgttttagacatgaagtccttgcccatgcctatgtcctgaatggtaatgcctaggttttcttctagggtttttatggttttaggtctaacgtttaagtctttaatccatcttgaattcatttttgtataaggtgtaaggaagggatccagtttcagctttctacatatggctagccagttttcccagcaccatttattaaatagggaatcctttccccattgcttgtttttctcgggtttatcaaagatcagatagttgtagatatgtggcattatttctgagggctctgttctgttccattgatcaatatctctgttttggtaccagtaccatgctgctttggttactgtagccttgtagtatagtttgaagtcaggtagtgtgatgcctccagctttgttcttttggcttaggattgacttggcgatgcgggctcttttttggttccatatgaacttggaaccaacccaaatgtccaacaatgatagactggattaagaaagtgtggcacatatataccatggaatactatgcagccataaaaaatgatgagttcatgtcctttgtagggacatggatgaaattggaaatcatcattctcagtaaactatcgcaagaacaaaaaaccaaacaccgcatattctcactcataggtgggaattgaacaatgagatcacatggacacaggaaggggaatatcacactctggggactgttgtggggcggggggaggggggagggatagcaccgggagatatacctaatgctagatgacgagttagtgggttcagcacaccagcatggcacatgtatacatatgtaactaacctgcacaatgtgcacatgtaccctaaaacttaaagtataataaaaaaaaaaagaatcttaagagctttatgtgagttttgaaaatgcatgtaaatgtaatatttttatttatttcattttagttgtatttatttaaatttttctaatgtagaataacattaaataacagtatagtttttaatctatatcaagaggatgaaggaacaaaatctgcatgttttgtttgcttattcaaatgtgaaatgctttctaatcaagttgaatattttaattatttttaaatttttagtcaatattaagtcatttatggaaattgcctttcagtctgtatgccacttataatttgttaatcttaggtatataggctaaagtggaaagtactagaatatagaaagtaatagtaaaactttcagtttctacctggttttttcattcttatgaaatcttagtatatgagaaggaataagtaatgaaagataacttattatctaacaaaataaacttatttatttgcctaaagcttctggtgatatttaaggtaaattaataattgaaacagaacagaacagttattggatttactaaatatggaagagttctacatatgatatacctatatgtacctatgtacttatgtaactaagtgtatgtgtggtgtgcaatcatttaggtatacacacacaaacacacacacacacagaatctgctttactttgaaattgcttcaacagtagacttatatggttattttatctatagtaatataatgtatctcaagccttctaaatatactattaagaaaatttttaggctgggcgcagtggcttacgcctgtaatcccagtactttgggaggccgaggtgggtggatcatgaggccaggagattgagaccatcctggacgacatgaggaaaccctgtctctactaaaatacaaaaaagtagccgggcgtggtggcacacacctgtaattccagctacttgggacactgaggctgaggaatcacctgaacttcagagccggacgttgcagtgaaccgagatcttgccactgcactccagcctggcgacagagtaagactccagaaagaaagaaagaaggaaggaaggaaggaaggagatatctaattaacaaatatatgtgtttctaaatttgcgatttctcagtaagttaaaactgagttaagtgtacacaaatagtcgaagagattaattgatttcattgtgaaatatttttaaataatgtattgattcatcctacatgtaaaagccaggcaccattcaaggtataggagacacaacagctcacagtacagagagacatcttgttcttaaggaatttgtattgtaattgaagaagacaaacaataaggaaatatatagaaaaatatcaagtagtaataatggtagcttgatatacattgaacatgccatcgaaataaaaagtcactggttacataagaatgaaatggttctatattctcatgatacatccatgattaggaagagttgccatttctgtaagatcatgaccaaccttctcctgaacattctgagctacaacttgatgatcaggtctgcaagacttcactcaaatctggccttattacatctcaaattccattctaacctctctccccttagcgatctcatccacgctgcctttcctcagttcctcctaacgtgttatcttcccaggttcaattcttgatctgagctatgtcttttaccttgaatgcataaattcttcatcaattaaacaaattccacaaaataaatatgaggcattcatactattacacatatagaatacaaagcagaagataacaggaaatactttaatgaatgcagataacacaatgtttcttttttaatttgaaattttaaagtaactttaaaatttctaataatttttcaaattaaatttaaacataggtattaaagtaaaacaaccaagatttctcgtgttaattgttgactttttgagccaacagatgtgtatttcttaaatagagcacattgaaaagctagtaagtacaattttataaatctaacaacgtcatctcttttctgtgctacaaagaatgagtggttataaattgaaattattatttttaacttatatatagtagaggtccaggaatttacattatgtttttatgctctgagagttgcaaaatagcagctgtgctgttaaagaatccccttctcgccaagggaagaatgctgacaatgacataaacatacactcttaactttttatatttccctaaatcctaaaaattagtgctctcctttgcatttttatatggctatgttataaaacagttagttttaaaggaaaaagtcgtaaaatctcaataggtaaaagggatataaaggtcacttaatttaaccttctgtcaatttctaagaaatagtttccgtaatattcctgacaagaagcttatgaacatttgcttggacactctgccgtggcaaacctgggattgcccaaaacagccaatagtatttttaagtagatgaaccaaatcttactataatgttatatgcatttacttagtctcttttgctgcacagggcagccacaaatgtagtttattatttagtaaatattgggattttaaaatttagaatttaaatctcctaagttatttttatatgataaattcacatttctaaaaaggcaactcaaacaaaagcagtttttattatatcccttctcattcattcaggctcatctaacttaaagtaagtaactacaactaaaatttatctatgttgctatgagaataaaaggtttaataaattaactagttttgaaaataaattatatcagatattcaacaagtcatatataaaaatatgttatgtgccaggcattgaggctgcacaggtgaataaatggactgagttccttccctcacagtttttcatgttaaacaaacagacagaaataaacctgtaaagaaatttgataataatttttgatgaatttgatcatgtgaaatgatcctggtaatatatacttgtaatcagttgttgtatgtgggaaggaaaaaatgaagtggttctaggtatgacttgaagaaacctttgtcatttacatacggtgctgcctgtcccaagagatggtggcaaggcaagatgggaaagaagggacccattaaaacatacctgtagcttaagcgaagtcattgtacttagtaaattatcagacttacataaattaatttttctagaccagcaaactgatgcctagcttagggtagcattccaacagcatgttgcatgccagcttatcagagcaaagtagtcaccaagtgcaatgggaagtcccagtgctagcatggaacacattgacgcagtcagggaaggaatagtgtccaatactgaaagacggtgatttggaaacctacacaaggttcttatggtgacaaatgaggcagattcatgactaggattacaggatgaaggaattcaggagaagctaaattgggacaaatgcagaagataatttgttgcattatccaaggtttaattgcatctgataaatgggtaaagcatgagacttgctccttctgaaatgaacctcttggacaataattgttttgctttaaaaatccttaagtagactttgtgtttttaccccatagaatgcatgcatcaatttaaaagtagtactttcatggttaaacagctccgacaagggaagtatagaccttgttggtatggttagcatttgataaggtgtagggtggagaaatttccaaagagatattctgcataagctacctaaagttaaacttgatattaaatgtccactatactcatggttagaattttctagtctcatctgggaagattctggagtttcatttctgggataggtatcttagcaattaatcacagataatcacaaataatcataagtgtatcagtagtagtcaatttgatggaatctaggctggttgatgtgaacataggcttggttttagggaataagtcaagtcctaaggcggaggagtgaaatggaaaatctctacatttgccttctattccaagatacaattatattttttgaatatatatttatggcacaaacttgaatgcacatattaatgtatttttgaatgcccttaaaaaatttgtgtgttactccttgggtgtttaaacaacatgggctgtgaaataaggttatttgggctcaaattcaggctgctgtctttcctagttgagttacattggcaagttaattaacttcttttacctctacatattaatgtgtaaaataagtataacactagtaaaacagtaacagaattgttgtaaggattaaatgagccagtgcatgcaaagcatttaaaacattgctttgcacacataggaagcactctctgtgtgctagttatttatggtaatgatgaacatcatcatagcaatgcctctgactctgaagaaagaataagttataagttaatagaatctttactgagtagtattccttttctattaactttttattattgaaaatttcaaatatacataaaattagaagagtactgaattcccatatgcctacccatcattttgttttaacaatggtcatctcaaggcaaatcttgtctcatacttccacccaatttcttcccttcttccagagatttttgaagcaaatctcaaacatatgctctgtaatctgtacatatttttaatgtttttcttttttgttctactttacgttcagtgtatattttctaaagatgggtaaatcttttcttacatcacaaacacataatctttatcactcctaaaatctcttaacatttactaaatatcccattaggcttcacatttcacctgttttcatatatgcgtatatgtgatgactgaaaaaccaagcactgctaacatacttaaagaggtttattctgagccaatgtgagtgtctgcagcctcgtgttacacagtctcaggaggtcctgggaaagtgcgcccgaagagatcgagttatagtttaattttatacatttcagggaaacgggaattgccgggaaaatcataaatcaatacatgagagatatacattggtttgatctgaaaaagcaggacatctcgaaccaggggcttttacagtcataggtggattttagagactctttgattgacaatttcagttgagagagttaagctattgtttaaagacttgaagttcgtagaaatgaatgcttaagttaagataaaggggtctgtggtcctatgatgctctaacagagtcagattggaaactgagccacaatattcaggcttaatttaaaaaaaaaccactttttaagtagattttatgatttgtagggcatgactccctaggcctcttagatagaagtttgagtgagagaaaaaaaaaggccagagttcagtctatatatgtatatttgtgggtggccatattcatggaatcattcaaaatattgtgctttccatgtatttcgtctaaattgacactttatcttttaatgagaaaagaaatgagaatcttcagacttgggtttgaaaaactttgggtcaatcagttattgggcttgtttcatctgaaaaatgaagaatgtagatgaggtgatttccaaaggcctcttacattttttataattccatgataattttagtctaaaagttacgtgcaaattagactttgaatatcagtcctcaacaccagagctagtgtgtatttcaggggtattatttgagaatcgttctgttttattcacatagcaatgacactcattttcggcttggagactcataaatgaattagagctatgcagagctgataagaagagaacagggtatcaaactatggcaccctgtgatggtgcctagcatttctcttcatttttgctttacttctaaagtcatattaactttgaaaaggccttggatttatgagacaactcttcctccctccccccgaaaattctcaaagcacatttcagaaactcatttttggcagatgtaaatttaagtaaattggccaaggtcacagcacaataagggcagagttatcaagggaatgcagtttcctgctttttccaccatccatgaaattagagtaactccaccccttaaaataaaagggtctacttttttttttctttctgaaattataaaccttgatttggaaattttttttaatcattaactcagactttcaaaagtggtcatttagagctgtggaatgtttatgggtgcactatgcatctactattactattactgaacatcttacgacctctacaatttgttttaaaagggagtgcattttttgtttgagctgaaccatcagattttcttttcatgcggtatgacatgaggaagaatctatctgtaggcacaaaactagttcactttctatgggcaagcgcagactttaaagtagattattaaagtacacagaaatagaaaattagatcagaagtgatgttttactgtgaggtcttctttgggccttataaaacgagaaagaactaaccttgttctatttctgagttctgaaaaaaaagcctcatagcaggcatatcacctttaattaggtttctgcttttgggaagcattttaccagccccctttcatttatttttaatgatgttatcactaacaggcaaacagtcccttaataaaacaaaaacagtttctatataaagcctggtgtacatgttctgagtcagtcatctaaaaacaaatgttatgattgtttccgttgtgctcttagaacacttaatggccctactgtgcagatatgcaaaacatcaacctaggaaatataaccgtgtctgttttgcagctttcaataaatgctttcccatattcacctgcagtatcagcagtgaggttaaacctactgggtcatggaaatgacagaaaggtcaattaagtgaatcttttcagcctaagctatgccagttcttgcataaacactgatgacttatgtctttaagaaacaagcagatgtgaatgcaacccaaaatatttgaaagttaaatcagtgtgtgtgtgtgtgtgtgtgtgtgtctgcgtgtgtgtgtgtgtgtgtgtgcgcgtgctcgcatgtgtgtgtgtttaatgcttggtgccattccatttttttccaagaaatttcaaattgtcaaaggaacaaaaacctctgtacacagatacccgagttctcaagttttgtctcctcagatgagtttgctaagataatgatggatttgctgtcaaggccaagattggaaatattaatagatagcttgatcttagaatttctgaatacagaaatttttgaaatacagatacagaatagccagaaactaaagattcttttttgagcataataatagaaaatatgatttccccctaaaaatacagtttcttcagggaattggggttcctgattttcttgagctgttatccttgcatggtttcctcatacaacctcttgacctccctctagttaagtcttccccaaaattcagtgcccgtttcttgccatggtggttttctttttttttttcttctttcccctttcaactcacatcatctaaacagaatctcttcttttttctaaataagcaccaggtgccatttgaatcactcttttggcatataaccttattgagattataaatgcatgcatttaaaaaattttattcctagagcttcctcttaactcaagataatgtctgtgaaattgcctcgtaatcaatagagtggttttccaatagaaggtatttttagttttactatcatggatgtggtataaccctgggacaggcaaagactatatccttctcatttttgcagtctgtattcctccagcttttgctttgccttatctcattcacatattctttcagtaaatattaataagtacttactatatgttaggtagctgcgactagatgatcgatttcctcctcaaaagagtggtccccaactttcataagcatctcaaaagagaactattcaaaagttaagactcactgatataggtgatagttgcatataataagcgtggaatacatatgcattaaattaggcaacactgtgagtttggtgtatttttgtagcaaacctccaacattctgccaaacacaatgatttcattcccatatatttttttttcttttattcactcaaactcaaaattcagagttctaatgctgcttgaagtatatccaagaagcctcttaagtggttttatgttattcacagtctatttctgcaaaacctgtactgtgtgtgtatgtgtgtgtgtgtctgtgtatctgtgtgtgtgtgtgtgtgtgtgtgtgtgtgtgtgtgtgtgtgtcaacacatatttcctctaggtcctgccacctgaagagaaattgataaaccagttcatattctttgccctttcccaaattatttctatcaaagtcaattttaaccaaactaactcagggttagtccatataaggaaactgatgtatacagtaataattctttcatcaacattatacatcttcatcaaagccttatcagagagacataatatagaaactacagacttagggcaggggcgcagtggctcacacctgtaatcccagcactttgggaggccgaggcaggcggatcacccaaggtggggagttcgagaccagcatgaccaacatggagaaaccccgtctctaccaacaaatacaaaattagcccggtacggtggcccatatctgtaaccccagctactcgggaggctgaggcaggagaaccacctgaacccaggatgcagaggttgccgtgagccgagattgagccattgtactccagtctgggcaataagagcgaaactcagtctcaaaaaaaaaaaggaagaaaccacaggcttatggtacaagaacagaatttcctccgtggcacattgaagccaagtttccaaaatgaaatttataaaatgtataattgattggattatttgttaattattcatccattcatactttatattaatatagtattttatattttacaaagcactttcacatgcataatctaattggatttaaactataatcctttgaattggtaatcatcgttttaataaataaatgaaatgagtctcaaataagagacaggttcttagctctaaaatttgcttgtacttggtagagccaggacttgaattcatactttcttaatcaagcctggtttgcttttcattttaccatagctgtatcatgtcttgcattttggtgtcaattttataaaaatttctggagtaactttaaatccagaatttgaagaatgggcattaagtaaaatataggaaataagttttattcccaaatacctctagatattttatatgcatcagcatagatatataaaagtcattttgataaattttaatgtgatatttcagaattccttattttctgagaagatggaggtagaaagaaaaaacatttacctgataattttttctcctttttttatctgtatatattcttgtggtacaagtgtaattttattatatggatagactgcatagtggtgaagtcagggttttggatatccattacctgaaaagcctacattgtactcgttaaataatttctcatcatgaacctcccccattcccacacccttctgagtctcaattgtctatcagtctacactctatgtccttgtacacattacttagctcccacttataaatgagaacatgaagtattcatctttctataactgacttgttttaagataatggcctccagatccagtcatattgctgcaaaagacataatttcattcttatttatggctgaatagtattccattttgtctatatatatacacatacacaatatatatatatgttgcatatctttttgtgtgtgtatatatatatatatatatatatatatatatatatatatatatatacatagcaatttttttgttttttgggagacaaagtcttgctgtgtcgctcaggctggagtgcagtggtgccatctccgctcaccgcaacctctgccccctaggttcaagccaatcttgtgctgtgcctcagccctccaaatagctgggattacagattcatgctaccacaccaaactaatttttgtacttttagtagagatggggcttctccatgttggtcaggctggtctctaactcctggcctcaagtgatccacctgcctgggactcccaaagtgctgggatttcaggcgtaagccactgtgcccggcctgtatcacattttttaatccagtcatcccctgatggacacttaggttgattttatatttttgccactgtgaatagtgctgtaataaacatacaagtgcaagtatctttttgatataacgatttctttccttatgggctggtatccagtagtggtattgctgggtcgaatagtagttttctttttagttctttgagaaatctgcatactgttttccatagaggttgtactaatttacattctcaccataatgtataaatattccctttcctttacaccctcatcaatatctgtaattttttctttctgtaaaatttattattagtatctactgctaaattaagccgagagtgcctagagtgagaatgaatcagtactgaggttacaattgagctcagtttaaacaactgtgttttatgtctggaaataattttcaaaattttttaggcaccaacccttaatctatagattatttatacttctactccaatttaatatgtctagtaagtttgccaaaacacttataaatgtatctttctgtatatttgtgatggacatttattaatataataaaattttatatttttataagtaattgtttacttctgtatggaaactattttattctctagtattttgctaaaatcttcttcactttgccagtatagaaatagagagttttcaaggaaactcccagatctgttttaaacattaaacatggagatattttccattttaataatactgtatacttcaactcgaaatgaataattgtgaatctctttgtaatgtgtgcttttctagaagtgattgagtgtttttctatttggaatttgtgatataataaaagacattagagaccaaaacacacagacacacattaacttgaaagagaatatataatccaaacccaaagggattagttatgaaaataacaactgagttagattttattaacaggaaagaaaacattttaaaagtagaggcccattatttttttaaacaacattgttccttaggatatcctgctaaattgttatgtgtgataagattggagagaaaaatactttgtcttacagaggcatcaatcttactgatagtcagttattgataagtgacttaatttttaaacattttcttctcttccatttctggtttctcattttgttttctattattctaattgactgtatgttgttataattatcaatgtatttattatataattattaagatgttaataagtagtttttctggtcaagattataatatgtgctgctttatttttctttagaaaaccactatagtttcaaataactgaattaaaaaacaaataattcttaacttacaatggcattacatcctgataaaacccatcataatttgaaaatattgtaaattaaaaatgcatttagtacacctaacctaccaaacgtcattgcttagcctaccctacctgaaatgtgctcacttacattaacctacagataggcaacttcatctaacacgaaacttattttataataaagtgttaaatatctcacatactgcatattgctaacccaggggaaaaaaagtcaaaattcaaaactcaaagtatcaaaattgcaatggttttataccattgtaaaattgaaaatcgcaatggtttcataccattgcatattgctaacccagggaaaaaaaatcaaaattcaaagtatcaaaattgcagtggttttatactactgtaaaactgaaaattgcaatggtttcattccactaacaacttaatgtagagaactagcataactgccagaccctacccatgtgtagtcctctaaaaaataacagtattctagttactgcatcttttgaaagtgcttaatttttttcctaggaagatgcactttttgctgcatctgatttgccatcaaaggtattgggagtgctgccttataggtgactgaactgtgatctaatttaataaaagaaaacaagataatttaagaatcttataaagtggagcttgtaaacctaagtaattaataacttgttctgaaattttacttgtatgactcattctttttcagatattacatagatattcataaatctttgaaattaataattttaaaacttttaaaatttctaactccaaactgatacattgttactcttcatcataataggtgagaagcccacttaaataattttttataaatttttataaaaagtattagaaaatgtggaattttacatttgtgtggtcctacatttgtctcatttaacctgatatttttttgtaaatgaggaaattgaatagaaagaagttgttccacgtccaaagcagctaatactaactgaacatttaagttatttttattatatttgccagagaaaaagttacatactgttttagttatccatagctgtgtaataagttataccaaaacttagtggcttaaaccaacaaacatttatgtaggatttatgatcctacagtttctgtggctcaagaatctaggtacagcttccctgggtgcttctggtttaaggtctcatgggattgcaatcaatcaacctgtcagccagggctgcagccattaatgctttaactggttaggaagaatctactttcaacccaactcgtgaggttggccctcagtcccttgttgcatgtacgtctccacagggctgtctcatgtcatgtcaactggtttgacccatggcaagcaatgcaaaagaaagagagagagaaatggaagctagacattttataaccaaatctctgtctctgaagtgacatctcatgtttgttgtattctttttgttaggtcaagagaaaaggaccagacagggtgtgactaacaggataagaaatcatcacagtccctcttagaggccacttcgtgcttactacatgcccataaaaaaaaaaaaaaactcattaagaacatgtcacaaaaaagttaaaatatttgttatgtaactaccgtaaacaaaaaatctcaaaaataatacaattggaatgtggactcttgattaaatcatcgtattcttcatatgttattcttgctgattttggactgtgtttatgtaagagtgtgtccttgtacttaagaaatatacactgaaatcttaaggcttaattggggaagatggttcaaacatatgcaccctccctcacaccatacacacacacatacactcacacacacacacacacactcacacacacacagaacaagagagggagagaagcagagagagaatttaaaaaaaaaaaagtgacaaaatgtaaacaattggtgaactggagttttattacttttccagagctggccataacaaatgaccttaaccctggtgccttaaaacaacagaagtttattatctcacagttctggagactagaagtccaaaatgaaggtgtcagcagaaatgagctccttccaagggccattttttatctcttttagcttccagtggttgtctcccttccttaactgtaggtgaaacattctaacatctgcctagttttcactttgccttttctcttctctgtgtcttctcttctgcctctttcaaacctttctctgcttttgtcttaaaagacacttgccattggatttagggtccatcctaaaccaaaatgatctcctcatctcaagatcttaacttaattccctctgtgaaaacccttttttaaagtaaaataacattacttgtcgttacatgtcaggaagtatgaataaacatatagtttgcggtcagccattcacacattacaggactatgaaggaattccttgtacaattcgtgtaacttttctgtaagtatacaattattttaaagtaaaatgttttttaagaaaacaaaaaaaaacaagaaattacattgtcaaatgctatactaatccaaaaatcatgacatctgactagccaactttctcttaaagataagcttagaaatatgtacagatatatcaatgagaataaggtattttgtgaatttgtatttcatcatcattcactctttgaagtcagtggagattatgtgatgtcaaaactctcttctacattggcctctcaaacttttgctttaatcttcttagaacatttaggaaatcaaaggtcacttttatttcaaaaggtggaaccatggtcccaatattacaatctttgtaggaagagctaaacgaaatcttctatgatattaattgccacaagatgacaactttatgtctgataatagggtcatgagacccaaaggaatattcttgtttgtttgatcttcaagtagtttgtttgtgttcttttcaaaattgtgtattgactttaagaatcattttttcgcttcttaaacattctgccccaaatttgctaatttcttatgtacatattgaattaaagcgtccttacgtagtctcttcgctatgtaagatgataaatgaaggaatccaattagataagtttgtaacaaataatagcctattctcatacagctgaaaccacgaggcccaaaatgagcgttccattaaaacagctgcaggaaaaaatgtgcttacaggcatgcacgcacacatgtacatatatatatacagaattttactgctatatttggataaatggagtatctgaagaaataatgagtgaaggaaaactgtattagtggctataggaattagctatttaacaattgaaatcagtcactctaggctacatgagcctcttgaggctttctgtttgtgtttttagcatttgatctccagtatccagcacattgtttatgttaaataaatactggctacataaatttatgcatcatgagtgatttaatgatttaatccacacaacagccaaatgtagtcaagcataaatgcactgaagttaaatcaaataattatggggatgatgaaacttatagcctaaatgtgtgtaaatgtgtacacatacatatgattctttattttcttggacagtctttaataattgtggaatcatagattctaaagctgaaagcaacttcaggtggtcatctggttctatgcctttcttcaagagacaagcaattattatccccatgatctattaagccacattttctttagcatgtgacagctaaggtgatgatgatcgaaagatattgctctccattcttaaacaatttcacatgcacatatatgtttaacaagtgcctttccagagctattatgagaaaacactagcagccttggtttggaagagcaatttatgatagctaggtaaatggtgtccaagatcaccttgctcacattagccatgcagcatccctgcccctgcatggccatctttctttaaccctggtgacaagtgtgattaaaaagaaaaataacatgagtcctactttagtttgcttactctgtttcttcctctagtacttgctgcctcagatcatctgtctcagtaagttaacataggaggaagtagaaggagaaactgcaaagtcgtgagtgtgagaggagttaataggaggccttctggccgttactcccctctccagcttttctttccttttggtttattaactagaaatgtggcaaggtgagggagatgaatttaacttgttctgacattagtgagggacagggaagtgtggcagcttctacaatatttctgccccagagagacgtaattggaaaacgtgttgtgtggttagatggtgtaatgaaaaataaaagaatgattgaggagaacagtggaatcaaattataagcataaggcaagtgtgctgaagtttttagctacttgcaaaattgagagatactatcgggactgtgcaaatacattgctctgattaattttcctggggtgaaatatgaaaatatttataaaactgaggatcctgccatgaataaaattttctctgtgattatgataaactaaaataagccgtaacttgtatctatcttatgtgaaactgtaaaaatggttaaacaataaagaaaactgaataaaaggatttcactgtgagaggtgaaaagaatctgtattcatgagttactctaaattgcttaaaaatttgaagaatattcaataagactagtttattttgaagggatttttaaatttgattccctgaatgttgttatagaagtagcattttattactcttcctttataccgttttttatgtatggaagctataatttttcaatatgaaggtaaaaggtcttcaagttcaaaaaaattatgtctttaattttaatgatgatgaataattcagttataatttagaaatacatatttggattccagtttttctttttaggtgtaaagtgaaagattttaactttacattcttttgtaaattccttaagaatatatttgaacaaacattgatataaaggaagggttaatagagaaagaagcttcctaatatacaaagcccctctcttatatggagctctagaaatactctattgtcaatccaaacagaacaaactaaaaggagataattgggaaggtgcccataaagtcagcctgaatatattatcacaactatatatgagataatatttgttttaaaaagattctatggcactgtaaactcagtctcattagagactgcatttaaaaggcttataaagttactcattaatgttatcttgttgtatctccacagctttttcattaaagaaaattcagcagaaagcattttctcctgatagcaggaaccaatttgcaataaatgttctggaaaccactagggaagccattactgaggtctaataaaaacagacaagcgtaacttgttctatatttttgtttcaatcacatgcagatgagaccccgctttctacaccaaccgcaagagacagccttgacaaactctctctaactgggcatggacaaccactgcctccaggttttccatctccttttctgtttcctgatggactgtcttccatcgagactcttctgactaacatacaggtaggcctttttacaacctggaagaaagacatatggaacaccctgttgtagattttttttttccaaaatttatactgttcctacttaatcccattagactgactgaaacatggtattaaactcttcaagcaacttagattttaaacctgttacactaatcaaattagcttagaaatactcatatatatatatatattcatatatatgtatattaagccataataaaaacttagatgaaaatgacataggcctttaaaattcattctgtctaaaatgctctctttattaccaactaattggaggaatttaactgtttaagtttgtctgattttactaaacaacggcacactagttctaataaatatttagttatttttaaactgctggccttctagtgaggaaatgatatgtttagtcatttaaaatatgtctaatttagaagaatccaaaaaaatgccttctttcataaataagtttgtttcaattaatagaatttcttcaaagactagacttcaaaaagccttaccaaactttccacggatttcctatgtggtcctcaggatgtatattttatgtacagtacattatgaatcaaaaatacttacagttaacaataacatagagtgtggagccaagataataagagtgtttgggatagaagaaagcataattttcttgcccacacatgaagtgatcatgtggaccccagatggagatttttgtcatctacttctccatatttgggtagctagtgagtagtaggcagaagttgctgatagtgtgctggtaagctcctttttagaaaaattcttttactctaacattccatcctcagtaatatttttctgtacacatatcctatcatattaaagtttcccccagtggaaatgtaattaattttatttacctctccaaggacataacagaaggcctttaatgtaacatatcttctcatctattaatatggcattttttaatactaatgtaattagagtctccagaactgtattcaactttaaggttttataactcagtaattgaaaatcatcaatccagcctatactaaatcatggccaaatagtcgattatataaaacaaaagacttttctttctaaatttcacccatattattgtttattataagatagtgcttttaatgaatttttcttatgttaaggtaaatgttttcagaaaatatcccttaacatttctgaatttatgttctgaaaagtaaaggaataattcattttcttatgtataaaactcaatatgaagcaaaagaaaagctatttgcatggattgtcattaactgaaagctctttaaccaggtcagtgaggatttaatttcaatttcagcagagaaaacgtttctgggtttcatcagtgtaaaacagcatgctcatctgaagagcaggtttgacacatggactcttgaattgtatatgaccactacatttcaaagtcaaatcctctcagtttggagtattcatccacactctacggaccagaaatactcagattaggaatgttatccacatcacctcgaactataattatttcagaaggaagaaaagaaaaaataaaagaaagaaagaaaagaagaaaaagaacactccagctttaaaatgtacacattttagacaaattactcattgtaggtggctctagatttaatatactctcctttcctaccatatgccttcaagacatattttcaaaagagtagataaaaggacaatggtcaagacaagctaaataatttatttctattcccaaattatagggatctgggactgataaagttagaacacccaaaataagaatgctttattaaaaataaattaagggtcgggtgccgtggctcatgcctgtaatcccagcgctttgggaggccaaggcaggtggatcacctgagatcgggagttcgagaccagcctggccagcatcatgaagccccgtctctactaaaaaaaaaatacaaaaaattagccaggcatagtggcaggtgcctgtaatcccagctactcgagaggttgaggcaggagaattgctggaacctgggaggtggaggttgcagtgagctgagactgtgccaccacactccagcctgggcatcaagagtgaaactccatctcagatagatagatagatagatagatagatagatagatagatagaaataaattaattaattaatttagcttgtccgcttcaatcttacttatatgtatgtgtatatatagatgcagttatcatatatttatatgtatgtctaatatgcatatgcatatatttatacatgcatgtacatatgtgcccacaaggtgaaataaaaattaaaaatcctacagaatttcatgcacatgtatattataaatatatatatacacacacatacatatacaaacacacacatatttattgttagtaatgatttcatatcattttacaaaagcttgcagatgctaactcttttactattgtcacatttactgagttatggtattatcataggaatggtatggaatgtttaaacagtcatgaccccggattattaggtatacagtataaatgtgattgctgtccaaattctaatatgggtaattacattctgcctacctcaatttcctctgcagtttcaattatatataatagggttctgtgctttctatgccaaaatggtacatactttttgtgtagtaagtttaaagttccattttttaaagatgttattttttattaaaattaatgaccaaaaaaccctttaaaataacgtgttttcataaagtgttattgttctaatgatcaataatttatatattataatttaaaaagcctggatttttaaatttgtaatgattaccacagatgtcctttccatgacatcatcatcaaaattaaatttttgtcagttatttctttgtgttttaaaagaagatctatagaaaaatactataattatatgtgaaaattttgtgtttaaatttttattttaaaatttaaatttataaaatgtacatatatataaaaattgggcaccagacttttgttaactatttgagctatactgaattcctgcatttaagtgttatagaaattaaaagttagccaggtgcagtggctcatgactgtaatcccagcactttgggaggcctaggtgggtggatctcaaggtccagagattgagaccatcctggccaatatagtcaaaccctgtctctactaaaaatgtaaaaattagctgggtgtggtggcacatgcctgtagtcccaggtactcaggaggctgaggctggagaatcacttgaacccgggaggcagaggttgcagagccaagattgcgccactgcactccagcctggcgacagaacaagactccctccagctaaaaaaaaaaaaaaaaaaaaaaaaagaagaaaagaaaagttataatgaatgaagtaaaaagaaaaaaaaagacctgtaaaaaaaatcctatgttgatatataaaaaattatatttaaattttatatttagaaatttataaaatttatatatataaaaaattgggcaccagatttttgttactgcttgagctatactacttcctgacatttgagtgttttagaaattaaaagtgataatggatacagatatctagagtaaaaaactaatttaatttagtgaagaatatggatacagttcagtttttgatttttagaattgcttttattttttctatatggcatttttttttcattgtggtctatctttcattatggcttcctctttcaatcctgtccatggagaacaacctgtgagattttatgtaaggagactaaaattttagtatcagttaactggatatgacaccgtcaaacatgagctaccattagaacatgatcaaaggataattctgcttactcttttttctttttttttttttaaatttaagacggagtctccctctgtcgcccaggctgcagtgcagtggcaccatctgggctcactgcaacttccgcctctcaagtgattctcctgcctcagcctcctgagtagctgggagtagcctcccaccaccaaacctggcaatttttaaaaagcattttagtagagatgcatttcaccatgttggccagacttgtctcaaactcctgaccttaactaatctacccacctcccaaagtgctggggttacaggcgtgagccaccgcgcccgggcctactcactttttaaaatctagaaccttttggcacatagggttgtgaacaaattatttactttgtttatcttgttacaaaaaggctttaaaaagtggcttacaaacattaaaataagaatagttaaataactaaaaagtgaaaatgtaaagtttaagtagagaatataaaatttagttaggagtgaggttagcattgaagatatttgccatgaggggatatatgattggagtttggttcactatagtctacctacatggaagaattaagcaaacaagaaagacctaaaacatatgttaaaaccacaatagcttcagcttggctgggtgctgtgactcatacctgtaatcccagcactttgggaggctgaggcaataagaccacttgaggccaggagtttgagaccagcctgagaaacatagggagaccctgcctctacaaaaatacaaaaattagctgggcatgatggggcatgcccacagtcccagctattaatattcatgaggatgaggcaggaggatggtttgatcccaggagttcaaggctacagtaagctatgatggcaccactgcactccaccctggggtgactgagtgagaccctatcttaaaaacacatacacacacaagaaatggcagctccagattgattcactatagcctagtaaatggacataatccaaccatggtatctaggaggaattattctctacttctgtgtttgtgggaagaaaatgaaaaagaattaagtataagactgaactatagtcatgcatcacttaatgctggggatacattctgagaaatgaatcattggacagtcttagagttgtgcaaacatcatagaatgcacttatacaaacctagaggatattgcctagtatatacctgtctatacagtataccctattgctcctaggctatgtacctgtatagcagattactatattgaatactgtagacaactgtaacacaatagcaagtatttgtgtgtctaaacatagaaaaggtacagtaaaaatatgatattataatcttatgggaccaccatcatatatgcttgcggaccaaaaagttgttatggaggtgaatgactgtactctgattatctatcttcagttctttacatttcaatatcatggccaataattttactttacttttcaatatattttaaaataaaataatagtttccttatttacattaatatataattttaattataatttaattataaaattataattataaaaattattgtaattataattttattatgtattcatttatattatattaatatattatttattataaggtattatttgttatttattatattaatttttatataaatataataattttaactgtaacattaaatttaatcataatttaattattgatacataatttaattataatatataattatatataatattaattaggagaagactttgcataaaccccaacaaaatagacgttgaattcaaaatatggggaagctaatatcaaatatattggccctacattatatgtttttattttcaatcgtaattatatattatgagtcttctcttctttgttcctgtcatacatcggcgttgcaggacaataatcatagcattaaagagtatggtattatattttgttacaaaagcttctctgaaaatgtgtcagttgggccgggcgccatgtctcacgctgtaatcccagcactttgggatgctgaggtgggtggatcgcctgaggtaaggggtttgaaatcatcctggccaacatgacaaaaccccgtctctactaaaaatacaaaaaaataagccgggtatggtggcacatgcctgtaatcccagctacttgggaggctgaggcaggagaatcgcttgaacctgggaagcagaggttgcagtgagccgagatcgcgccatttgcacgccagcctgggcaacaagatcgaaactccatctcaaaaaaaaaaaaaaaaaaaaaactgtcagttgatactgtactattgattatttgtttgttttttggtctacaaaagttcctgattccaagggacattattctttttctccctgaaaagagaccagggaaacattaaaagaataataaagaagactaagtagctggacagttctgatctaggcacactcaactcagtatttgggattttcagtcagtctcttgattcttctgcatcttggttttctcatctttaaaagtatttggttaggatggtgattgctaaaatcctcttcaactaaggtgttttaatttcattagaagcaacacattattgagaacaaattttatcacatgagtttcagtgacactcgagaaaccttagatattgtctgattctgaaataaatttatgttaaatacaaacatggatcaagtaagcttctcctccaggatctagctaggttattaagaaatgtttcttagcagtattatttgaagtcttcttatatagacagatattgtactttctaagccgtatcaactgtagaaacattgctagatacagtaccctttaaaaaaaaaactcaatctctaaaaaatgatgaaaataatttacaaattagattattttagaaaacaatgacatttatgtagtataacaaccattatgcctcactcagaaaaaaaatttggggtcaatcaactattgtctctcaccattgctgtggcataaacttaaaatgtatttcattagacttgtcattaaccgacttcagtatcctaagaaccatcctccccttggagaaaaaatcatgctttaaaccttctatcgttttttgtcattcacatttttgccacagcattttctggatattgcatgtccaagtgagatgcagcatttaacgtgaccgtttgcacgtgatcaacctggaaattttacagaagttacacaaatctgaaagtattattatcattgatggctacaatggtgtcctaaagatttgtagatgttctgaacactacatcctattgcttttcccagccccctgctgcactgaaatttaatccgttttctgtattttttgaagcagagctgtcactggcggtaacatacttttgcatatgcatcagtttggctctagtacagatttttgttcacactggactcctactgatatgcactgatacaaagtctaaaaattacatttaattttatatagcttataagtagtcccagagagtattggatcctaaaagctaatatttttcagacataatcagcaggaataggtaatgtattaccattagtcacattagcagcaattgtaacaaaaggaaacagtaaacataaatgctctcagcaacttcattctttacaacgaatattaatataaaattacacaaattagagttgcagtttaacattattcaacatgtttattcataatgattgtttcacatttaaataacaccaaaatattgtgttttgtcagccaaggacaataatagtttaatagtaatttattttaaacagctactgataatacaaccaatcaacacattaagtggtgccaacattggcatcttgctaaataatctctagacattgcacacagagtacatctttcaaagataagtcaacaagagcaatcagagcagaaaattagaatttggtatcttagaattaaaatacagctaaagttttaattggggtgatctaaaagggcacttgatgtaatgatctctttcatttgttactaattgtttgttcctgacgaagaagaagcctacacaggaatgttgttgaattgagttaagatggcagtttccttagcagctatgttttactgttaaacaaaaaagagtggggaggggcaacctgccacggagaaatctttcttcagcttgtttcatatcacaagaattataccaggagattcagggtcaggtatagcaaatatggaataatttgtatgtggtcaaaagagaataaaattggcttacagcaatgctataaactatattggtagactgaagtaaaactatctgtctattgcgcttacaagtcaagctggagtagaaattcctgattcgaactgctcacaatgtcttcttgcaagggagtcacatcctagagtacatctacaaatgacatcaactttcatctcattttaacttcagttgaaaatttcagtctctgacactcacagaccaaggcaaaatatcttctacttcaaaaactcattttgtattgctgaattgaagagaagttttagctctaatttttactagtaactgtttcaaagtatcttaggagagaaaacagagaatgctttttatatgtttaacatatttccatatctaattttcaagaaccttaaaatactgctaatttttaaaagcatacagtatgtcaaaatatatacatatttatatattcaccattagttgtatgaataaactttgctttctccatatgttcttttaaattattatgctgtctaatcatttcctagaagttatcctgagtttattacaaccatcttgaatggctttttaaaaagtaatgcactactaaaccaagttttagatcgcttaaatatattacgtatctcaagaaaaatgtagcagtactataattgctatttgtgaaattttaaaatctagtatatagtaggcactttctgggccctgggggcatagtcctgaatgagagaacatgtctctgccccagagagcttacattttaataaagaagacataacataaatcagtaaacaaataaatatatgtcaataccacataatgatacattctatgaagaattttagggagggagtaataagatacatttggagatagggtagtaagagatggcctctcttgaatggtgactttgagcaaagatgaaatgaaatgagggtgtgagccatgcaaagatctggaggaaaagcattcaggaagggaacagaaagagcaaagtccgtgggggcagaaacaaattgttgcattgaggaaccaaaaggagaccattgtggctatgtgctcatggtagggagtgggagaatgagctctgaggagaaaggtgagcactgccagaatcctggaaggttgcataaaccatgtcagataattacttgtggaggagtttcagcctaatttccttctcagttcttattttttagacatgcttatgtgctgcccttatttagctttggatctagatattctaattagaatatctacttagctttggatctagatattctaattagaagcaattaaacctgcatgccataaatatttgtcttccgaaaatagtttaattagacttaggagttttatgctttagttatagtatttgttctagtgagtgcagagtgaatgcgaaagaattaggtcatttgatcactgggttctttgctttgaaaatgcttttaagtaatgaacgaaatttgctttgtattaaaatattaccattccgaatatcttctttgtacaggggctgttgaaagttgccatagataatgccagagctcaagagaaacaggtccaactggaaaaaactgagctgaagatggattttttaagggaaagagaactaagggaaacacttgagaagcagttggctatggaacaaaagaatagaggtatttccaaatttccagataagttaaatatttacagaaaatattaaacatattaatactatgatggtgatttattttgaaattgtagtatttttgttaatttaacggtagctaaagttcagagcagaatttgaatcctaggctcattgtatttcttaatctccaaagtacatgttttcttttctgttcctacctcaggaaattgaaatacatccattacatcattaattatataacttttattgattgttgagtttaaaaattcatgttctttaagataagaataaactctaatgatagccatgaagaaaaattttatgttaattcacaattgccctttgaaaaacttgagttaaactcataaagctaaaatagaaaatactgattattcaagtgaagcaggtttactaagatatttatcaactgaaattgaaaatggatgaatatctgaacaaatgaccaaagttaaatgtttgtataattttctttctgaaggcctcattttcatccaacaaggtcaagtacacagagtagaaactgatataaattcttattggataaaataatattattgatctgtgaactgcttcttttgtcacactgtatggtgcatctatagataattttgaaggtcatttatatttgcatgtttattttatgtatgaatttgaagattattttgtctacaatcaactgcctctttgcttcaactatgcatttaatatatatccaatataaatgctccacattattttcctttatatgtttgaaatggtcatttaaaaatagttgtttctattttgtctttaaactagcaggatttaccaggttgttttattagctattacgaagcaacagttagtgtattcctggaagttggtcattttgggacactgtcatctcagatgtatagcacagttctaaataatgtggcttcacatagattcaggtatttaaataatcaaaacaaggtaaacattgataatggctgtattccaagtgaataaataagttgggtcaaagaactcaatctatggaaccagcttccatgagacagccatgtttttattttgttctcacttaattttgtttagtccttttttacagaacttaaaagcaggcccggggattcctaaagtaaccctttggttactggagagaccttcagaattttattggttcaaaccttttgggaggatttacattctgttttctttcgttaaccactagagggcaaaacattcacagatcacaccgtaaagttcccatttaattaattacgaacagtaaattcaaggcaataactatcaatacttatctattatgaatgtgcctattgaagcagtgtatcaccctgaagagagagaacatgacgatcccatttggttcaatcatgtaggaggaaactgtgagcggtcaatggcaaagtgcagggtattaagcctttagagccacaagagtgtacaatccaaataaatatttcagaaattactgtttctttacaaagagactcataaataatcatttttggaaagggaaacagtaggcaggtaattttgttaaggtaagcacatgatttgcacaccattaaataagggaaattaacgtttaaaatcagtttcaatttcttttcgtataacaccatagccagtgtacattttgatacaaacaggtttttaaaaatatatgatacagcaacaatacacctgacatgtaaattagcttccatcttaaaaatattaataataggccgggcacggtggctcacacctgtaatcccagcactttgggagggcgagacgggtggatcatgaggtcaggagatccagaccatcctggctaacaaggtgaaaccgcgcctctactaaaaaatacaaaaaattagccgggcgtggtggcaggtgcctgtagtcccagctacttgggaggctgaggcaggagaatggcgtgaacctgggaggcagagctttcagtgagccaagatcgcgccactgcactccagcctgggctgggcaacagagcgagactccgtctcaaaaaaaaaaaaaaaaaaaaaaaaaatatatatatatatatatatatataataataaaaacaggattatgtggaaattagaaattaaaactaaaatacttgagtcgttattattttataatttgattattctgctttaaaaatgttgctgttctttaatctgtagtaagaaatcaaacagtaaatatggaatgattagtcttcatgactaagagaagcattttctcatactgagtctgtcacgttgatatctacaatgtttatcaaccatcaacaaagataattttaaagaaaaatgcatattcccatatgctgagtagttaccatatgtatacatatatatgtagtaaaagttaaaacaattatcctccagaaaacatagttgatatacattttgtaaagaacagtagttattatttatcgagtatgtatcatatacaaatatttaaattgtccagttggagaaaaatgtttcataatcaactttttgtattatctatttttttaaatataaaaggctcattattgttaccagcagcatattattattagcaatgggggttcatactgcctcagatttctgcagagtgaaagtagaataattttcttaaaatatatcatagtactgtaaatttgctgtgagaaaaatattctcaggaaatcatcgtaacttcatccaaacaaaaacatttctgttctatacattaacaataattaaaagtattttttctagtgtacaaaaaatatttattacatttcctaaaattttaagaaagaaattattaaaaactgagttggtctaacattgctttccaaagcgtttttaggggagatgctccatttgctgctcaaaattgatgccctatgaggaaataggaaggaggcatgcttataagcgtttgcactatccaaatgactctgcactattgtgattcaaggacagagaactaagccacaaaattcatttaatcaagcttcctttatcagtgaatacaaacatttactaaaattagtttcctattaaatttatctttacatatggcaattaaagccattcttgtaatgtaatagttctaggctaaaataaaaattggctttcttattattttactgggaattattttagataaaggtggagatttttggaactttctttttataggtagactcagttcagcaggaaaacaaaatgaataatataaaaaatatagaccatttggaaattagcagcattatgaaaatttaaaaataataataataatatgcatacactcttttttagccatagttcaaaagaggctaaagaaggagaagaaggcaaagagaaaattgcaggaagcacttgagtttgagacgaaacggcgtgaacaagcagaacagacgctaaaacaggcagcttcaacagatagtctcagggtcttaaatggtaagagggtgtatattattgcatgaataactgtcatttttaatgcttaaaggacagtttaggcatgtgtttgtagttttgtatgtttctatatcttgtgattcattcagctatacttgaagctgaaagcagggtgggaagaacgtgttggggaaaatgccttattttataggtgcttccactgttttttactgaactccagcatctgggacttggcattacttctctgcttaaccagatttttttctactgaagcacaataaaatagtaatttgagaatttccgaaccccatcctcttttatgaacaatgttgcattgcttactgttcaaatcttccgaaaattcttacggttacagtttttgttcaacctttaaaagatgacaaagatttacgtaattttaattcagcaccaaagtaacaggttgctctttttttttaaaggacaataggaatcaaatgaaatatgtgtcactcttacctttctgtgcttttagactctctgaccccagagatagaggctgaccgcagtggcggcagaacagatgctgaaaggacaatacaaggtaggaatttgcagaaggctataaatctagatcttgctatatgagtttttcctcagctttagcctgctattcaagcatgtagcctaccatctgggccacatcaaaacaagttcaaacaaggtcaagttcatcttgcttgtttatatgagtgaattcattttgtgctgatagattttctttaaattaacaggtcatctctgtttatacaatgcaattaaaaggaataattaattttaaacaatgtatgatttaatcttggacacagtaaatgtgctttattgaatgtgtgaagcccagtctaatgcaggaagggtttataagttctgtgctacataaataaaatatgtggttaatcaaataggtagttcttacaatttaaaaatgtctaactactcatttttatgacagttactgcaaggtacctgcaaaatagactagttgaatgttaacaataaataagactgtttagttcctatgtggattccaaatgttctgtatgccattatatacactttaataacacaaatctgctgagtaaaatcatatatagcataccaaagggagttgtattaaatgctcagaagagctaaatatgtatattgtcatgatcgtactattagaaaagaataaaaccagaaggtagcatttataggcaaacatctattccagacgacaaattcaacctaacaacatgaatactaaacagtaacaagagcatttgttttctatttaaaatgaaggtgattcttcaaagggatgcctaaaatgattaactgccataatcctcccaattgcttttattctgcattttaaactcaatcatttttaggatatcatatgacgttaattgtgttacttaatcagctccaaatatgtcattcttggcttagtgtaaaggaaatatacttttgtaaactatcatatgtgcaagaagtaacaatcacaaacttgaagaaacatttttgaggaaagaatggattttttttgcctatatttattttacctgaggccattctaattaatttgtaaatcctaaggtttgaatcatatgttattatgagacatcttggatatacaagattaatgctattgtagatatagaaaaagatctgaatttttagagtactatggatttcagcacaattatattgtgtatgtgtttgtatgtatatggtcatgacaattaaaagaatcctcttgcatcttataaaacttacatacacatgttcaaaattactgttaatgaaaaaaccagtcctctttatcagggacaatagcaccaacaagacaaatgcaaatatcagcaccaatgtgtacatgcaggggctattcacgcattagataatgtcaaagtggtctcagaaagcacatgagcccatagataagtgtgacatataaatcatctgatatacacagaatcctcaaggtggtcagaagtcaatctagaaaaaattgaaacaatatcgtcctgcatataaatgagagattcgttgttaatattaagaagtgattaaacatttttgtatggttgatgatataatatgtatgccacccataacaacatgttggttgttaataaggctatggttatttttgtttgaatttgtcaaatttacatatgttcaaacatacattttaatataggtaaagtcttgctgtatgaggctgaaatgttgacaactttcagtttccattgttgtgactgacttattctgaagaaaagttttaatcacaaattgctttccttttagtatccagaatcttaccagtggaggaatacagtaaacctatgcaccaacaacttaatggttagggaaacaaaacatttgtacaacaattatacatagtaatttaaaaccatatacacattttatggaattatttttgcctttaattgtaatagaaaatcctcactcactttattcattcattcagcctgtccattgttgtactggtcaaaatgtacagttgttttttaataaaacatactaactattcattatatttatcagataatatgacttttcccaaattgtaataagaaaaaacactgtcaatgaatctgtttctagctgttagttgctaaaagatattttaccagcagtcaaactatttcaagactcttaacataacagagcaaagagatcatatttgctattctaacaccctattcaataagctttattagccctttgaaatttttttctaacctcagacaaaattcatacatttggaagctaacaaacagaatacaattaactgtgaacaaaagcaatcaaagaaagaatactgtatttagttaaatgttgtctaaggacaagaaagggaaaggcaaaaaagaaagaaccagaactcattactaatttgtgaaacggtctatgtcatgccttttgggagccatgagcacctgctgcttcacaattcaagaatgacacacacacagcctctcacactcatcactttctctctccaactgtccccaagcccaggtgttatgacattctttgtattatttcttgctccaaatccaaccataactgaaattattttctattccaaagtaaactcaatttattgggaaagacaaaataagcccacaggttttttaattttttcatgtatttttaacatttctggcaataaataaatgccacacttggcccaagagttagtcacctagaagttgggcacttaaatacttactgcttgagtgctaagtaattacccctaaatatgcacctctgggtagactaaatattgcctcattggcattttgtatcaccatttctataaaaccacagaggtggacaagaggaatcaagaaagtagtttagaaagtatttctgaagaaagaagccctaaataatttacttgcattttcttaatgaagtaaatcagctcatagtacgcagggtagattctttattgctgattttcaaataactaggaattcatgaattgtaaaaatgctataagtacagaacagacattcaaaaattttaaaaaaacttcttccaggaactgaaatatatggccattaactgtcttatgccttatgtcacacagatttatatggcatgatttgtgttggactttgaaaaatttaccctactcaagaatttctctaagatcttttgaatctataaagtagacagagttcataaaaacaatcatcgagcagtgttttgggccagtcagtaaatatccctcaaaacccctctggcccctacacatatatatgcacatacgcgtacattttatgtagccaaatctataacatgatggctttcttcagctaagtcgtcatcttattttattccttctccttaggcaacagcatctactttcatagtttccttcttttttctttttcttttcttttttttttgagacagagtctcactctgttgcccaggctggagtgcagtggcaccatctcggttcaccataacctccacctcctgggttcaagcgattctcctgcctcagcctcctgagtagctgggactacgggcgtgcaccaccaggcccggtggtgtttttagtagagacggtgtttcactatgttgaccaggctggtctcgaactcctgaccttgtgatccgcccagcttggcctcccaaagtgctgggattacaagcgtgagccaccgctcctggccccgtagtttctttaacttacatatttagaaaatttatagacatttttccaatccactcagacatctcttaagagctccagataataatatccaactttttatttggtcgactcacagagacccaaaagttcagtgcacaaaacggtatgtatcctctcccctctccccaagcctgcctttctccagtgttccttccctatggcaccctaatccatctagtccaatattgtcgttaatatgtaatgagggcagagtggagcgtgacatttccctccctcactccctcatcctctatgcccagtcacgactctttccctccaatctctgtgctcccatcatactggaagtttttgttgttgtttcacttctttccccacctattggagacattttttcttcttccttgcctttacttaaccaccccttaagtcccagcttggaaatattacctcaaggaacacttcccagacccctcactctcccgctgtggcaactccctgccccctgggactagttctgcctcttagaggttcttactacaccttccatttctccataggaacatctgtacatgcagttccttgttcaatgccttcttcttatctctatggtagctggggcagagcataaaccatgcatgttttgttcactgccatgttcctattgtctgagagagtatctggcacatagtggtgcctgctattccctgaaggaatgaatcagccatcgaggaattaggacctatgttagatcttgtggatatgaagatccttaatgttctgacatttctcagactttggttgaagagactgatgagagggaaaaatggatgacctaagaaacccagaattagaccgggtgcggtggcttacaactgtaatcccagcactttgggaggctgagtagggcggatcccaaggtcaggagtttgagaccagcctggccaacatagtgaaaccccatctccactaaaaatgtaagaaatgggccgggcatggtggcaagtgtctgtaatgccagctactcgggaggctgaggcaggagaatcaggctgaggcaggagaatcacttgaacctttgaggcagaggttgcagtgagccgaagttgcaccactgcactccagcccgggcaacagtgcgagactctgtctcaaaaaaaaaaaagaaaaaacagaaagaaggaaacccagaattaatgtttatatgcaatagctgaattaacaggatgtgtttattcttcgtttgcatttttaactttattttcttcttttcacatttgacgtaagatttggattctataaatacttagatccaattttccattttaaattgatatttcacttaccacaataacaaaaagttcattttcaaactagtagttttttgctttcactttttaagtaaaaacaagttttttaaaaccaagaaaaataattgttaaaaccaatggcgatatagaccacagttcctctgacatcttagactatctgcaagttgtgcttgcaaaatcttgacttcacttgaaagtacaactcttttatttacatccaatgaccataatcaaaactgtttggctttttcttcttttttgactgatcttagatcatagaaaaccaaatattcttccaataaaaagacataaaagacttgccttcacattaaaaatcttttttctaatgtaaaaatatcttctttctgtttgctaaacatttgaagatacatgctgaattttaaaattattcagtttttcaacaaatatttattcaacgttgatgatatgccaagcacacttttatgtaactgctttaacattgggaaaggactttaagataaaataaatctccttattgtgcaaaagagggggcttagtgaggttggatgacttgttaaaagtcacactaagagtttattggagctaggactgtaagtccagttgctttccacatcttgttcttcctggttgcttttagattaggattgttaaattattcccttcttactcttttacaatatattattattgttgttgttatttgttttgttaacttacagctccaaagaatcatatttcatgtcattcttatgatgggaatttacatctttgagcaagcttttttttttcttaaatcaaatatgctgtcactcaatgaatttcctagtaatacattttctttcatttagacaggtatattaatagtaagtggaagtatttactcattaaaatagttaggtggattgggaactgaaatgtattgagcctttcctgtgtattctaatttaaaggcaagatcacctaagatcagaatgactgattaactttctcacagtcacactactagttaatggggtttctgggtttctggcattgaatcgagatttatgacttcaaagtccttgttgcttccaccaaaactttttacccaggcttacatgtcccttttataagataaccactcccaaccacatcactcattttagatagttagcttgttgcctcttaatgaccaaaaagtccaaaacagtgtactgccaacgaatgatatacaattgaaaaaatgtttcctttcctgctttttactttttcatcagccattgtgcctatattatgtttatagacacttccagacacactgggggaaaccccactctaagcaaagaaaataaagtgacagtgaaaaaattaagacagtaatcatatttagagaaaaaaatctacaacttaacatgtaatgaatttatgataaatttacaatgtcagcgacagatccaattttgatttaatatatgacatttggtgagcccctttgtttcttttgacgtatgcatttgaatagaagttgctaaatggtatcccaagactttcatactttaacagcactaaattgtatcctacttatacttaccacttttaagatctttatgaaagtattgttcaagtttgattgtcatataattgttaatgcacatttcaatttctaatatgacttttaagatcggtgtgggaatgggggttccttaggcacttctatggaagctaatagttaagaaatgctagaaatcacatctagactgaaatctctgccccattgtttcccccacccctttagcaatagcttaacctcaaaaggtcattgtgaagattaaataaaataatccatgtaaagcacttagcacatgctgggcaatagtttgtatacagttaagttttagatgttagtattaaattttattattacaatatatttactacaggtcttggcaattggtaaacactgaagctgttattacttttaatatgtaatttacttttccctttttgggaaatcgacttgtgtttataatacaatgttgaattattcccatagtaaagtgtttgtggaaatgtccaagaactttttaatgttacctaaccacgttttccatatttaaaagtgtctttatttagattgaaaagggggatgtgggggagaaggagaggtttcttagaaacacaacaaacaaacaaatcaggactaaaactgttttcggggctgcctgcactgcatattgactattgattagtcatttagaaataagtaatcaccatgggtattaccttaaaccatttttctcgatcttaaaatataaatattagaattatgttactatgaacaaaacaaaacaataaatttccctctagtcccttggcactggtttctggtgtttggcagcatttctataaagctaatcaatttaagatgtcactgattaaattgaacaaaaggtgatattgattgtaggcagtaagcaataaacggactattgttctatagttattataggtcattgttaactactcatttaactagacaatcagttattaatattaaacagaaagttttagcgatacccataaatgttaacattttataaaattttagaattttttttatttcagcataaatattttattcttttttatttattttattttattattattatactttaaattttagggtacatgtgcacaatgtgcaggttagttacatatgtatacatggccatgctggtgtgctgcacccattaactcgtcatttagcattaggtatatctgctaatgctatccctcccccctccccccaccccacaacagtccccagagtgtgatgttccccttcctgtgtccatgtgttctcattgttcaattctcacctatgagtgagaatatattttattcttttaaaaatatattttaaaaagtaatactgttttttaatgtaactggatatgcttgaactccaaatgctgaaggcctcttgtgggtttttgtgggaaattacttcttacataaattaaactatacgtgatatagacatagtaggcattgttaagtatgaagctgctcaaaatagtaatagaatgtaactcattataattatttactatgtaaaaatatttaaatacattattttcgtagagctagttttctaaactggtccttacgaaaaagaaaccattgttattatatgtctgtgttgggacatttcatgaagttttgtgatgttatttcaattagacagagaaaatttaggcataatgattgagcttagtttgtaatatatctgttgtcttttttttttttttttttttttgagacagggtgctgctctgtcacccaggctggagtgcagtggtgcaatcacagctcactgcatcctcaactttccagtctccagcaatcctcccacctcagcatcctgagtatttgggaccacagacgttgtgtgtgagaatgcccagctaattttcatattttttgtagacacaggattttgccatgttgctcaggctgatctcgaactcctgagctcaagcgatccacttgcctcggcctcccaaagtgatatgattacaggcgtgagccgccgcaccctgcctggcatcatgtttttctagtaaaaataatgtaatagggggttggcactatgagagttcgggagataaattactttaatctgggaatatcaagaatgatggattgaaagtggaagtttagagaggggaagtagacatcgtgcaactaaattgccattaaatattgaaacagagagttattaacagaaaatataaatgtcttgttagcataaataaagttgaaaaaaataaattaagttggcttgctcataaacatgtttgtggttgggcttaaatagtatctggaagaccaatagtcaaaaatagtgatatatggaaactgggaaagatattagcaggggaccctaaagatcaatgctagatccattttgatttaacatcataattagtagcatggaagagtggttaaacagtgcaccggtgaaattcacaagtgatcctaatttaaaagttgtgacacatctctgcggtcagtataaacatgcaaaataaacttggggaatttagaaatttaaggaagaatgaaataagattacctttgtaagaaagaaaatttaattttaacatctgtttttaaagaatattaagaagctcaacaaatatcaatgatagtatatgtccacttacatctttttatggtactatagtaacaacaattagctgcggggctgaggggagtatcagacaagaggtagaaaaatcagctgcatttaaatttcatatatgtatttgtaccgatgatactttttactactatgaattccaaataactaggaagttgctttttcattatagtcaatacgttaatttttaagcatttttatacagtatagtattatcttcagatttatgaaaaatatatttataaggttttgctttgagtttttttaacctttattatcaagtgaaaaaaatgatggttcagttggagcaagttatccaattaacttgttcatcaaacatcatcacaacaaaaaatgtatataatgactacaaaagctgaagaaggttatcatttagtaatatagataacaactaactctaatagttcatattcacaaagcctgcttcctctttttgtatttatcccccatggtaaggatatcctagccatcttagagaaactttaagaaacacagtggcttctttaagatagagcataaatacaattaattttttttctgagaaatgttatacttcaagagtcataaaagtgatctgaaaatatttaagtaacagaaaaagaacccccattttaagtctgttcattacaatacagatttgtatgagcaaaataaaaaattggtatacaaatgcatggttatggaaagtgtgttattaatttgatagcatgtatatatttagacattctaagcatataaactctttgatataaattcttctttagaaaaaaacataatcatttaaactataaatataaaaatgcttatagtgcattatcctacctcccatggttagggacagaatgcagacatgccacaataatgttgttttatttctactgttcgaaccatattaatgagaacatcattttggagaactaattatttctatttgtcttgtgtcacactttctaattcccctatattagcacagccaaagcaaattaattgcttttccagtagttgaaccttgtccaagaatgagctcacattcccttccagtttccctgtttctgggagtgcattgtgtcagaaatttctcttgatactaaacatagtcttgagaatatctttacagatttctgtgtgctcacttgatgaaatttctaagtttaagtgacccgccaagaaagataaagttcttagctgcaagattatacatcaaaacagttaaagtgaaattaaaattaaatgaatgaatctcactgaagcaaaaaaagcagtaattaatggttcccttaattgtcttcataaaatatttgcatgggtctaatttgcataatttgcatgtattaattaatctttcaaaggaattttgtgctgagagaagccaaaaaatctctttgttttatttaagatctaatgaaatatttatcttctttaatgaacttctcatcttcattaaaataaaaattgcacaagtttgtatgttttaaatgtttttataattgaagtattcaaaaaatctctttagtcttacaacagctgaaaaacaaacacattattttgcattcagtatcattttaacaacagcaacactttaaaataaagaaagttcaatttcactttctcaaagatggcaaatcatatggcaaatacatacagcgatttagttttaaaaataagatttataaagaccagctcattttttttaatgacaatgttatttttatggctgaaatactgggcaattagagggtatgggtatttttctcatccatatgagaaaaatcagaatgtttaattgtttgggaaatggttcattggttgaaaatattttagctggttaaaagaaattagtctgtaaaaatctatttgttattattaacaactgttagattgactgacagtgtttcctggcagaaactacacagttctaactttattctaaatctatctgctaaagaattgcagcaggagtttctcctctcacaaactaagagatcataatgaaaaccaagagccgtgccttggaagggatgaaatccaaaatctcatcaagtgccaaatagtatacgttcaagggaactgaggaggaatggaaggagagagcctggaagttaaaaagacataagggaaaggatattggtgatctcttaatgggattgtttttgacacagcagtgtttcaggatattaccaaaaaagaacatcatctaatacttccaaagcaatttaaggtttacacaacttttttacaggcattatttttattgatcttcaaagtaaacccattttatatttgacgaaactgaggtacatagatgtaagtcacttggactcaaactgtaaatccagaatctttgagttcctttgtctccatacgccttgcttcctacgtgacagcaatctttttatgtcatgagaatttatgaagtggctgtgagtgactaaatgttaaagtagataatgagggtggcataaatttatgaggattaagattcaaaatgcaaatatatagtctttctatgtaaagtttagtaatgtgataaaatcaattaaattgactttaagtttcctgtaggagtcatctttagtaaaaaggcattttcattagcttgcatttttctcaagacgttttctctaaaataaaacaaagtttagttttctctaaaataaattcactagtttacagggataattaataaatcagttacacaataaatgccaatacagattttattttactaatatcgataatgtatttaaataactggttttaaaatgagtaaaattaacattaatacagtttagtgctaagagagtagtgctgaactgagagtaatagtctagtgtcaatactatcattcattaatgttgtgaccttggtaactcactttaactgctaagtcctgttctaacactgatatttttattctgtcaaaatggcaaagacatctactttgttcactgagtatagacacacaaacacatgcacacacacgcatatgtattcatggtttgtgtgtgtgtgtgtgtgtgtgtgtgtgtgtgtgtgtgtagatagatagattctagacctggaattcctgggttcaaattcccatgctgctgttaactgtataatactaagtataataccaagtgtgtaaattacactgtttgatgttttgggttcctaatctgtaaaacaaagatgataataacattttatttgtgaaattgttatgaagattaaatgaattaatacacgtaaagaagttagaacagtaactggtagaggccgagtgttgaaaagattttgctatttttacaattatgcacaaatttaatgtaatagtagttgaaattgtgtttatttttggtaaaaattaaacatatcttgcattctcctcagtcaatgactttttttttctgtatgtgatacatagctattctttgaggcatgattgagctggaaaatgaaataaatattcaccagattttccagagcatttaaaaaattcatgacacggtgtgaatttcaataattacatcaattaaaacaatatagcacaaggagttttatttgcagctacatattatatataattatttatctctttcagaataaaaaataaaccagttattgttggctcaaatttaagatggaagcattagagtgtcttgatttttctattatatttggcaaatttctcctgatatgatttgtattttcatatagtgtggagtaactgcagactcttctaattcatatataatcacactccagagatagtaaatctccaaacatagttccacttaagcttactaattacacctataaaacgatgaatgatggctacaaattattggatctgactttcattctttatttatttctccctgggagaaagagtgctggatggggagattttagaccataaattatttccatacatattcaggtgtgctatgtttaactttgatttcataccctggtttaacatttacatttagttcataaggcttatgaagtcatcttaacagaattaagaactaattatttgatttctatggtaaaacaatattatattaataattttgatgtctttattttcttagtggtttatactggttaatatagttttaggcctctcttgttccaaagtatcattgtcttttgactgtccttaccaaatttctccagagaagttatatacaatttcacaacctgggccttattcatagttaaaggatagtgatttggagagaaatttcactaatgagaaatgtaagatagcaagaatggaaagcactttcctcttctaaacccaatagatagtaatgagtgccagccaaccccaatgggaccataagcccagtagtaccatatttattctctaaaggaactccaaatacatatttatatgcaaagttgcagattcttaaaagcaatgtagaagcctgagtacgatgcgggcttatttatgttctctgataatagtaagagagattttttaaaacctctgaataaaaaacaattataatacagcataaacaaatttgaaaatagcagttcagtcataaataaaggaaaaagctcccaaagctcttttgaatgaatgcgatgacttctcctaactgctttgaattcagacttacttttgagataatattttgagggccatcttcctacatcttcttttacatttatgccattcagattaacaccattgtgttaggcacttaagtggtataaatattgcaaaggataaaaatgcccaatatttttattatgtaaattctaattattcttcttaaatgatttgaaggaagaacatttaaagaaattgcagaagatgccttaatttaaagggttgatttattatataatatagtagctaataggcttgtatttccctaagagttcaggacctagcctggttaatgtgtcaaagtctcaattacagaaaatagtgaagtaaatgtaatagataagagaaaaatatgttaatggaataaagtcacaggtttactgtttatcctttggaatacatttcttgtaattcttcatatctttgctggaggagaccccattgaggtttgtaacatatttgcacttactttccaagggttaccagcagtggagtcaaatgggactggaataagctttttctccatgttgtttcattattcatagatattttattgtagtcttgtaatgagattttaaaatacaggccaaattcaaccagtgacttattgctcctttttacacccactaatataacaaatgaaggcaagtagccctaatgctttgactggtttggtttcaaactagacagaaacctcttcactggctcccaacaagacaaccttgtcaagcccaaatcaagggcacaggatggggcatcaacaccacccaatcatccacccagaaaacatgtaaatacactgaagaatatgagctgtcatgttaaacaatagaacaaatctcattttgatcaagagctgggaatagtatttagcttagtttctacatttcctcatctcgtaatttcacactcaccacaagagtctcaactgactaattccaaaaacactgataacatttatctacacagtgaaaatgttatgaaattaatgcttgagtggttataaatcaacacaggaaaagatgtggcgaattttctagaatgtttatatacttaagttttttcagtataactagatttttgttttctgtttctggtaagccatataataactgattttctaaactaatgtgtaaatatttagtttggtaggtaattgcctacttggatctcaaatgcagttcttggttgccttggtttgaacagtgtttttatgtatgactcttttctttgtgagaaaattagagcatagacatttatttaaacccaacaatgcacatagaagggctgtgaattctcatagcctagtggttcctttgcatgttattttataaaacacaaaaaatgcaaaaacctttccagtgattttcctaatggtaaaaatgcatagtcaacaaaagggtgaagttttatgatgcattacaaatctgcagacttttatattttaacacttgcagtgctttaacatgaaaaaatatgtgtataattttagcaatattaggtgactaatgatactttagatttatgagagacttgaaaataataaatcttgtttttcagtattggcaggatttatgatttctgaataaaatgagttagcaatgtgaaaaatataaatataaaatactagattctttcttctttgggcttaatttcagttttaatttcagttttaatttcttctctacttagcttttctcatctccctttgtataccactatctgaaggtctatgctttcatatggtttagctaataaatacaaaatataaagacatcccataaaaaaagttctggatgtttcaaaatcatgaatttaagttataatgaaacctcagaattgctcttctcatgtctttcactcaaataattttcatccattttctctcttcctgaaacactacaactgttataaaatcttcactgcagtatagaatggaaaaaatatggatgaacacattcttccagtatggcttccagactgctatcaatatactactctgagaattatcttatgaacagtttaagaggacaaaattttaaaatagctctttgtttttaatacatatcctcttgaattttcaaagtccatgtttagtattttaaagacaccaagatcctgcattaaagtactgcattaaaagttaagcatatttgacttattgaactagcatttcctaaaagtatctgacataaaacctttttattgaattaaaagtaataatatttcgtggaatgaactttggcaaactattgtccgtaactcttgttgaatctatctgtagcagccaattcactttaacaaatgcttatacactgaagtgcagggccaaaaaaaacaaaaacaaaaacaaaacaaaagacatatcctttctaattcacttataatctagtgggatatacagaaacaaatacttctaataaaatacatatttagttaattgtttttaatatagctgtagatatcaagatgttgttcagtgtggtaggaattttaggtcaggttttatttatataaaggtgtgaaatacttatgcattagattttattatatgaaacagaaacaattttaatgaatcaaaatatatcatgtgtatgtgtgtctaaatatttaaaagccaatatactctatacaatatttaggtagtcatagtttcaatttttctagtagaactcatttttagctttgttggctgtaagatctcacacaatattggaagcatgcatctaagcctaaaattgatctaataggtaaaatctaaaactttagaaattttgatattttttccctaagagatgtaaaaggtctagaattctcatttaataaagtatccactttaacccagtacttctgaaatgcatataaattgctttcagagtacaggcaactgtcagagtacattccaactggctgattgatgaagatttatttaagtcaagatatgtaagtctagatcttttgagaagccatattattaacatattttgcaaaatttttgcaaacaggaaataaataaatatgattgtttctcagtatggaattggacagattcacaaataacctttattaaagttaaaatctggcctctgctgttttttttaaattctgaaatcaatatagtaaattctaaataatatacacattacataaaaggtattcatataggtgagaataaagaaataaaaaatgtaattcattcagaaaagaggtaatgagtgttcatcttttggtattcataaggaatagagtaagaaatataaggggtaagtcaaattgtagtactaagaaaatgcaaaagccaaatggctgtgtttgaatttcataatctgggaaagagatccaggctaatgtagatgatgatgagtttggcttactaatatggggtgtgatgtgacaatgtgtcatttagatacagttgtagagtaagcacctcaggagatatgaagcaggcattggaatgtgaagtccagatgagagacacaactttggacataattgaagctgacaaaaatctcttatattgaaaatatagaatctctttgcataatcttgattttattactctgagaagtgagtcaagccactctccacttcatccttccacaaagaaaagacagtaataagagcaacgaaggcaacatttcgaagcaaagtatgttcaaatagcaatgagttaaaacattttgtaacatgttacattatccttgtatgaaatgaatgacctaatagtttttagaaatggataaaacataaagcagctttttttttcgtgggagttagaaaggatggatttgaattttgtccaggaaagtgagtgtaataaaactgggaccaagaaatttacagtgttagattatgtacatgaaattagaatagtgaatgataaaaatacatagtgttatgttagataattcatgttttgacttagttattttgcatctttgttgattctgcagattttatctataacaaagtgtcaattcaactcttgcattaagagacatgtatttttcatgatattgttccatatggcaatatgttggataccagtcctttcaagtaatcaaacttacattgaatagagtcataaacaaaaaagcaacaataatttactctcattgtaagcttttccttccgatgcatagatattttttgcagtcatttgaacagtataatgcattcttattttgatgaaggggaagtaaaaattattctttagtcttggtaaataaagaaaaacgtgctcatgtaatagtgtcccgatttatcacaagaaagtgtaggttataccaaaataatactattctcacacgatattttaagctttaggaacatcatgatctcttatataaaatgcatttggtaatagagtcatcaagtgtctagggctgcaacgtttagaatttttatctgagcactgaacttgtaaagaaatagagctgttacagatggctatacagctttgaactctttatacaggcaccacgatgctaccaaaacctgacggggaaacagccaacgtttattatccaagacatagaagttaatattcttaaagccatgcaagtaggttttcctgagaagaaatgaaattgaagtctgtccagttgaaatcaatgtagatgaccatggattttaagataaaatcagcattttgcattgaacagtttgctatcgtccaactgcaactgtgaattagccctaaaagagtggtatagagtccctatggtgggaaaataaagatttttattataaagtggtttagaactaaggctagatgaattccttaaattcataatgcttctcgaaatctaaccttaattcaggatataatgatctacatggtgacataagttaattttattcatgtcacaatcactagtgatgggaaaataaggcaatactgacagtaaccacagccacaagctattaattttaatggaaatagtggcctatgttaccatgacccagggcagaatttcacaatgggcatgaaatatacatatatcagcatttatcttctttctaaatatatgcacatttattataatatactttgcatgtttagttgtagagtttttgtgtttattttttgaaattatattaaagaagtttggcaatcttgtgaaatttaatatatgctgagaacaaaccggaactttcaaaagatgtaaattataagtccatagtgctcagatgtttcctgaaattctttgtttctagagatagagacaatttgtaaattgcaaaattatctattagcattacagttttttgtaataggacattttgcctttttttgttgttactgctttccattttagaaagcacttagtgtcttacatttgttattgtttgtgaccagtttgttgatcttttcatgagcaatttgcaaaggatgaggtctgtttccttagaaaatatgaagtatgataaacaatagctttaaaaatggtaagataccagatttaactgaaatagatctcagccaattacaatcactaaatcaaaagttctcaggaacactaaatatgttgccttgtttcattcaatctggtatctttttagatgcttttaagggacagatctagaatgtggttttcctcttttgctttttgtcagttcattaaactgtaacaacttcagcagtagggagctaaacaattgcctgggtaagttctgtcgcagtccatctagttacgtgatatgatcattattattctgagatatttttgatctgagaattaaactatttcgaattattgtttttatttctgagaaggccaccagatatcatgaaataatattgctctttaaggaaaatctgtttttattcccagtacaatcaaagcaccctaggataatacaagcaaattatttccacctactgaagaagatatatataggtacacatataggtagatatggatatatctatctatatctatctgtctatatagactccatatatggagagataggtatatgatatatctatctatctctatatatggagaggtatgtgtgtgtgtgtttgtgtgtgtatgacaaaacaaatcttttaaaagtgtgaaaataaatagtttgtgatttagaataatttatcttttcaatagcaaatcagatgtttgttttgatttttgcacattaagaacaataaatgttctgggaaacatgcaagttagccttgttcctctgaaaggcaggcaggctcctaggagaaatcaaaggcagcatttggtttggtgagttcacatgatctggaattatgttagcaatcttctctgtatttcagaagaaagcaaacagaggtactaacacactaaaactcacaagaactaaaatatttacctgtgacattgaccagaacatcttttctatcacggaatgactattagtgtcacaacaaattacctcaaaacttcatggcttaaaagaatatttactacctcacagtttctgtgtgtgaggaattggggactagcttagctgggccttctgctttgggtaccccaggctacaggaaggtgttggcaggcctacagtcatctctagactccactgagggacactccacttccaagctgactaatgtggctgttgccatgcctcctgtcctcaagagtgctagactgagggcctgggttccttgctggccattggccagaggccaccatcagttccttgccacacggtactctccacagggcagctcaatacatggcagcctgcttcatcagatcaagcaggtgaatagatctggggaagaagagtgtgcccacaacttgcaagttaccgtctttttagaacctaatcttgaaagtgacatcccatcattattaccatattctcctcattagaagcaagtccctaggtacaacccacacttaaggagaaggtatcatgtatggctgtaattgtaggaggcagggggcattgctgatcatcttagaggatgcctaccacagaaggctcttcagaaaataaaactgtccagttccctagtgagaatggaatcagaacaaggagtgtgatatattcctactatttaatggattcaggaatatatctaaagacagagcagatgtccatgtttgtctttgaaagtaacatcatccctgtctggtaaatttgcttgattaactgctttctccaggcttcatttcagggcaaacattctattgattctcatattcttcctttagttatgatatttctgtcaatgtgctttcttgcctgtttgctagtcattctttttaatataacgttgcacatctttgaacttatctcttctgtgtttttagtgcacagagggccaccttacttaaaagttcttgtataggatgttattgttctcacccatatactgtctaaatatcagttaatgatttcattaggtaagatataaagaaaagttatttccctatgaaagtgtcacttctttagctaggaaactctcatatttactgaaaagttttgagagctctttcattgaactttgcctgtcatttgtcaagttgaacactgtcagaatctcagctcagctttttgtaaacatattaaataaggctttaaagatgtagaactttattcacccacagttacctccctaaacaagtataatgtttattaaaagtaacaaattagtcatgttggagaaaatagaaaaaaagtagaaaatgctgaacttttaaaagccagatgatgagttttttttcttccaaacttagaagaaaataactaggctttgacaagagctgcccttctaattgccacctctggtttttttcttagagataacacataaatttattctgaaatctcaatttattcacaggattttgtctgtttcttgcagttctgaaaagatataaaggcttgaaatgaatcaaaatatccctgttttccttctctgtagcatcttatttgatcaaacaagaaatcatttttcttctatgctgtgttttaattaagtatattagataatatgtccattcattacttaggatcagatttgcacttatatgattatttccttccacccttgtttcttagtcttctttccctcagaaaggaatagaagaatggagaaagtaataagagatttctttgtctttcactttgatgaaatccagaggtctcacctcccaatcaggacaaggtaacctaagtgcaaagtaccccattctcacttgctggtacattaaccactctgatgacttcttgcttcttactaatgaatatttaattagaagacacacacaaaaatactttaccaaagcatttctccagcagtataaatttttttctttatttataaaagcaaagcaaaactttaaagagggcatgtgctctgctttttgtttttgtttttgataagcttttaaaagataacttaatatttatttcaaatagagtcaaacagaacagtaatttcttacactaacaaatgcacattgcatatgcagtcctaactcagtaacaggtaatagttaagcagacttcataaactttacaattgtaaatttgccattaaaacatgatagaccaatagactagaatctagctaatgtccacaccctctgtcgagtttcaaacctggtatttctggagaactctgttaagaaaatcatgaaccatttgttttctacctaatacttgaataaacttctcaaaaacctcattgctaagcaggaaaaatacttatcatgagaacactgtccgtatgaccagtgaaacagtatatgtggatagtagaaagggtaaatctttaactagttattaataaatatctgatatagctgacatattgaaatatctgatatagctgacgtaattttttttaatttgtgtttgaaaaaagaatttaagctaggtgcaatggctcatgtctttaatcccagcagtttgggaagcagaggcaggcaggtcgcatgagtccaggagtttgagaccagcctgggcaacaaggtgaaaccctgtctttactaaaaatacaaaaatgagccaggcatggtggcacatgcctgtagtcccagctactcgggaggcctacaggaagatcactggagcccaggaggcggaggttgcagtgagatgagatagtgccattgcactccagcctggatgacaaagtgaaaccctgtctaaaacaaaacaaaacaaaacaatacaaaaaaacaacaaaacaatttaaacttagagaagtccaggaacagtgtaaaaactgtcatgtattctttaccaagattcatcaattattaatattttgcctccatgtgttttagcattttctctgtctatataatattttctgaagcatttgagagtaagatgcacatattatgggcctttacctatcatctaatccatagttatttcagagtatttattaacaataaagatgttctcttgtatgcaaacacagtatatttatcagctcagtaaatatttcattgacaatactttgatctgatctgacatccaacttccaattttgtcatttgacccaataatgtcctttatagcatttgtttcccttcattactgaatctaaattagggtcacgtgctatatttagttgtcatttctctttagtctctttaatcttgagcattttcttagtcttttaaaaataatttataaaattgacatttttgaaaaatacagtccttttcttaatagaatgtttctcattttgcatctgatgtttcttcatgtttaggctcaggtcaggtatgctaagccaatatactatcccagtggggctgtgttcttcccaaggcataacatctagagccacataacatccatcttctcctcattttgtggcattaattttgatagttccttccatatatttttattgagccctttccatgtaccaagcaatgctcaagatgctagaaatacacaaatacggtattttatctgctcttaaggagatttatagccagtctttcagaaatttctgtaggatagtgaagcattatacttgtcagtgtaagaagacaacttgggagagatgatagtctgggtcctatgccacgtgcataggacaggaacaacatttaggttttagcaatgcaatatatgggatcccaactgtgtgtacatgagtttaggccactcattcgtgactaaaacactttgtcgaagggctttcttaacattaatcatataattgcctgttctttgttgcatagacaaacaatagatagttgacgatgatgatgatgattatcatcatcataattttttgttaattttgcttggttgttgttatggtaatacagttttaagaacattcagttcttgaacagatttgagttcatagaatcacaggatgcagatttcgaccccatttggggcagatccttgagtacagactagaatatcattaataccctctctcttaaccttcatagaacagaatgaagttagggctttcctctggatgaggttgtggcttaagggaatgtggttggtttgatcttttattcagaaccctcaaactttctccatatcagcaataaggctgttttgctttttgttatttgtgcgtccactagagtagcttttaatttccttcaagaacttttgtttttcattcacagtttggcaaactgtgcaagaggcctagcttttgttctgtctaggactttgacatgccttcttcaccaagctgaatcatttttagcatttgatttagagtgagagacatgcaagtcttcctttcatttgagaccatggtaagattattaattgacgtaatttcaatattgttgtgattcagggaatagggagccccaaggaatgggagagagatggggtaatcagttgttggtggaacagtcagaacacacgcaacatttattaagttcatcgtcttatatgggcatagttcgtggaacccccaaaacagttacaatagtaacatcaaagatcattgatcacagatcaccaaaacaggtataatcataatgaaaaagttgaaaatattgggagaattaccaaaatgtgacacagtaacattaagtgagcatttccccagtgcggagttgccacaaactttcaacttgttaaaacaaacaaacaaacaaacaaaaaaccaaaaaaaaaaaaaaaagtatctgtgtcccacaataaaatgaagcaaaataaaaggaggtaagcctgtaccttatcaaactgtgttttacagctttagatgatctcttgttctcagaacattttttcttgttttagggtacatgtgcacaacgtgcaggttagttacatatgtatacatgtgccatgttggtgtgccgaacccagtaactcgtcatttaacattaggtatatctccaaatgctatccctccccctccccccaccccacaacaggccctggtgtgtgatgttccccttcctgtgtccatgtgttctcattagaacatgttttcaactaacctgtgttctctcatgtactttcttatttgaagagaactgaaaaaatatataaaagcggtttgtgattacaattttttggtctaattattagccacaatcaagaactttacttcataccagccttttttaaaaaaatttttaatgatgcaataaattcgtttactttaagctctgggatacatgtgcagaacatgcatgtttgttacataggtatacatatgccatggtggtttgctgcacccatcaacccatcatctaggttttaagccctgcatgcattaggtatttgtcctaatgctctccctcccctagcccccaacccctgacaggccccagtgtgtgatgttcccttccctgtgtccatgtgttctcattgttcaactcccacttataagtgagaacatgagcataccagccctttttagtaaggcacattatctactctgatttcaaataagcaaggccatgttggtctattatgtaattcattacctatttcttttctttctttttttttcttttttgagacagtctcactctgttgcccaggctggagtgcagtggttcgatctcggctcactgcaatctccgccttccaggttgaagcaattctcctgcctcagcctcctgagtagctgggatcacaggcatgtgccaccacgccccgctaatttttgtatttttagtagagacagggttttgctggtctcaaactcctgacctcgggccatctgcctgcctcggcctccgaaagtgctgggattacaggcatgagccaccatgcccagccacttcattacctatttcttattgtggtgtatttggagtgtacagacaaagtaccctagttgttgtactttcctgcacacagtctttgcttattgtctagaacagcacccagtgctaatggaaaaagcatataaagaggatatgaggtctaatatgatgtctagtcctctctcaccttgacccaactctgtaggcctcaggttccccagttacaaccttgaaaaaaaaaaaaaaaccacagaatctgttactactttttcagtttttactttttaattatatttaaacacagctttgaatatattagtcttcaaacatctggaaatcacttgcactgttattatctgcatttcatgagaagaactgataattattcagtatcctcttataaatgggcctgtgcagaacatcagtctcactaaaatatttctcatgtttaatgtagactttgtgtctctgctttcttgctttagcagtagcagaatgttcttactctaaatataaaattataaaaaaagcaagaaacaatattttctttaattagcttcttcctttgggggttttagaagaggggttatgacttgacaaagatccttcccatctgttcctgtttgtttgcttttattttgacttcctttcgttgtcttatcaaatatcacatgaatcattaacatttgttttcatcgcttgctttggtttcctttacttcacatgatgaagacattatgttgagagacacacacggctactatattttatattaacctcagattctttaagtaaatattaaactttctggacatgtgatgtgatatgtttgccctctgctgtgttaatattttcctcagctctggaagagtgaggcatctgcatgtacaactgttttgtgaaagcagcaaatatccctagattacaggtgcctggatataagttttgaacaaatagttgacctgtttaataaagctacttcctaacagaaaacgcaatttattaagtccttcgtgcaaaagatgtgtaaaagatccttgtggatgtttgtgagggagttcttcccaaaactggaatagaaatctatttgcatattgtgtgataccttccacaagcatactccattgttaaggattttacatgactttcacagtgaacaaattggattttttggtgtcaatttgaaattgtattaatttatatgtcatcttcttatataaaatcttgtcacataatgtgagtgggtttttttttttttttctccaggctggagtgtggtggcgcaatcttggctcactgcaacttccgcttcctgggttcaagcaattctcctgcctcagcctcccaagtagctgggactacaggcgtgtgccaccacatccagctaatttttttgtatttttagtagagtcggggtttcaccatgatggcaggatggtctcgatttcctgacctcgtgatccacccgcctcagcctcccaaagtgctgggattacgggtgtgagccactgcgcccggccatatgattggcattaaacaaacttcattagtttttaaaataaatgatcaatctgttcaatactctagtttttatatatggaataaaagctaaattccacatctgtctatatgtattagatgttagcaataacttcatataataatacattaaaaaatattaaaccaaacattaaacttaatccgtgaatacaaaactagaaattttgagatagaattctcctgtctgtctcctcagacacagtgaataaaatatctaaaatctatatacttactgggtctgatttgatggttgcaactgtagtattaaaatctgagatccatttttacaaataatttacaagtttttcttcaatttattttctgtagatctaaatctgcatagtaacaaacagcatacaaaaattcacacgcacaataaactattcagtgatccttcttatataccaaatgctttcttagacacgagatactttcttatacaccaaattatagctgtaagcatcaaatcacaatgaactttgaaactattaggaatttgtaatttaaatagtttcgctcaatccctactcccaaatgcttttaattagaacagactttttaattaagtactcccatgcacaaagtttagcttgatgacttttctgtcatatcaacctcccatgcaaaagcaaataatcattgtgttaaaggaaggtattttctttgaaactacgctgtaagaattctagttctgatttcagtttgaccaattgaggctttgctgactaaaaagaagccctgctcccaggaggaaggcaaagagcagatccacaaggcagcgagacaaatggtactaggtgtttaggagtcagtcctataattctgtatgtcaaagacatcatattttttccagggacagtccagttgcttattagaggaaaagtgatagagtggaatggccatgaaatttgaattcacagaaatgtcaaatcactgcacttccatttgctagctctgtgaaaatgtgcaagatacttaaactctctatgccttaatagccttatttgtaagaggcattattttcttgggttggtggaaagtttagacttaaaatcgatatagcacctttaacatcacaggtgctcagaaaatgttagctttactgatacgaatcattattgccagtttacttaatcttaatgtaaagctttcatccatttgagatatcgaggaataactgattggtaaacttgcctcagcatgaggaacaaacaggaaatatattttttctgcgtcaaacacatacagaaagaaccaaagacaatgtagaaaatggtgggcaggagtgagattatctagttagagggtaagtatgatgtacaacgagtaacctttaatataaaatgtatgaatcaaccctctgagttgtcagatgtaaacagcacacctccgaataatgaggcctcagccatggacgcactccagggattccaataatctctcttttgccgctcatttttgcaaagtcttctccatggcccatggcttttcttgctgtttgaagagtcaggaaaggagagaatattgggaccattattatataacatacagacatggcacagtttgaattataggaccatatatccttcctagcacatttgccatccgcctttcattcaggtggtttgttaacagaaggctgagttagaaccacagccccataattcagaagcctgttgttagttccctgggtatgtccacatgcagctatttactgtgggctacagggccaatataacttctctggaacattataacatttgtttaaaattttgttcctacagacttttaatgatctgcaagtatgttttaataaatatgacaaaattatatgttagaactgcttttaaaataagggtctgtaaatgaaagaaagatagtcagtcttcaagggtctgtctgtgcctggtgcatttctgcctccggtggattctgaagtagaggatctctgatgtttaataattatttaatcatagagaactacctgaatgtgacaggtggggtctattttatagctgacatctttaatgcttgatacatttgtccatctgttaggaacattagccaaaaatttaataggagacatatttattaaaagtagaattacagcagatcagatactgagcacataatgtatgtaatttttataaacgtgttttatatagtacccatggtaaagatgcttatgaaatacttattactggtatattttacaaatctaagagagttttatttaaaatatttagttttagataaactttaacatttctaacatgctaataatttttgttacataggcatattaatgaatttctttcttcaaaagtttaacatttgaggccacactaaaacttttaatgcaaacaacaccatgctgaaggcttctcattctaatactggcagaaagaggcagctgcctcttccacggggcttatcgtgggggaggctcactttatatgacttcaaagtgagataagcgctatagagtaattcttagggtgatagtattgaggagtacttagtggagctctttgtagagaagttcaataggaggcagcagaaggggaagtagggagagagggtgtacttgtattctaggcttcttgaaggaagaacagacctgaatattccaacacaatatagagtttggcgtgctgtagaatagacaggccactaaacctaggggagggaagtaaaagataagactgaaaaggaaaagcagcaccagcttaggtaccactttgtagaccatggagaataatttggctagttaatgtaaatatgggtcttttaaataattattcatacttaaaagataatttgtataaatccatttttttgctcctggattctttctacttaatatactgcagatcacagatgattagaaaactatatttaatactttagttgcttttcttcattgtacagagacttaagagttccacagtgagtactgaaatgttacttttgagcaaattattactttttataaagtttatgaaggacttaggttaatgaaatttgaattctgtggaagttgacaaggtctcggttccctctgtttaatcctaggaaacattgcgtattttttaaaaaataagaatgggaatgataatctcaatataattgaatacatgctagaaataatgagacaattgaaaagagagttaagtagggataaataaattaagggattaagaattagaaagctttggcaaaagtatcaacactccatctttttggatacttctctattctctgttactagatttttaaacaaatcaatgttactttatgtagtagaaatcatttgaatcaaaattatctttagaacagtccaatttttagccaagtggtagtaaatatacgaaagacagaaatttttgttctgtttatttttataatattattaggtttgtttactaaataagtaattgaaactcctgctatgctgaaaccacaaataattatatattactcatataatgtaagtgagaaaaacatagtttggtcccacaggtgagcccaattaagctaagcaaacggaagaaatcaggccatattccatacgaaaacaataaatgttacacaatatgtcaacatggtactgccatatccttaattagaaataaatttttacctaaattatatggccttgatactagtatttgattaatacctgatttaggaggttccaatctttatttaataccaaaatgtctacagctgaactgcagtaatatttagtatcaatcagaaatgacagttaggggccaaagaggtaaaatccctttagactgcatatctacacatatctacagagagaattagacacagtttgtgcatgtctttacatcattgctcagaattagagttcagcaggattaaatacatgttttcactgattaatcttaggttatattttatatccaaacatgtatgctattttgagggagcagatctttattatgattattatatgtttcaactattaagaaaaatcctagtgtatgactgctgaactgaaaagctaagggtatttcttttttattttttcatttataactattattttttaatagagatggggtctcaccatgttgcccaggctggtctcgaactcctgggctcaggcagtcctccccgctcagcctcccaaagtgctggcattacagttgtgagccaccactcccagtcctgaaaagctaaggctatttagcaactttcaagtaatcattattattattcttaaagttgaactagattaattttaagagaggcaactgatatctgacacaacttattagcatttagccagtctgaggctaatctcatggacatccctgcctctgggagggaaaattgtggatttgagatgttcattatatgtttttatacttataatatatgtaattacatataatatataattacatttaataatatatataattatatatataattcaatatctactttgtgtaaaccatatgaaatctatatttttaaagacctatatctgattaatgcatttatttaacacatatttactaaacttacagtagtccctccttatctatagtttatcttcccgtagtctcagttacccattgtcaacaatagttggaaaatgttacagtattttgagagacagaaaggctacatttacataacttatattagagtatattgttataattgttctattattatccatgtagctataattgcatcattattatctataattgttaatctcttactgtgcctaatttataaattaagctttatcataggtatgtatgtatacaaaaaaaaacatagtatacatagggtttggtactatccatgatttcaggcatccactggcagtctggacatatcccccacagataagggaggactactgtatactctgtgcaaaagggaggactctgtatactcaatgagcaaaatagagtttcatgacatcttggaggtagtatttcaaccctacaaatgtttattaagatgttttattgcagcattattcacaatagccaagatttggaagcaacctaattgtccatcagcagatgaatgaagaaaatggtgtacacatacgcaatagaatactattcagccataaaaagaatgagatcctgtcatttacagcaacatggatgaaactggaggtcattatgctaagtgaaataagccaagcacagaaaggcaaactttgtatgttctcactttatttgtgggagctaaaaattaaaaccattaaatttgtggagatagagtgtagaatgatggttgccagagactgggaaggttagtgaggagagtggggagggagtggggatagttaatgggttcaaaaaaataggatgaatgaataaaatctaacatttgatagcacaacaaagagactatagttcatagtaattggtacattttaaaataactgaaagagactggattgtttgtaacacagaggataagtgtttgaggtgatagacaccccatttacccagatgtgattattatgcatgcatgcctgtatctaaatatgcaatgtatcccataaatataatatatgcacctaatatttacccacaagaattaaaaacattttttaaaaaggaaggattataaaaaatagaaaaaaatgagaggaatatataatttgggcttaccaatatttctatgaagtacgacatgatttaacattgctgatattaagttccttgcaacttactatatccactatagattgtataaaagtagttgtataaaagttgaaggtgaggtccataaatatttagactatcttttttatttcctgaatgtactataggtcatttatgttttcttatattttaattcttccagttaccagacattttgcaaacatttacatggcaatatgtacttttcaaagctcggaaaactttccttttctgattgttctcctttctactgtacatattaaaatttgaatttcagacatatattagacaaatatatacaaagtttaggccataccaggaagtagacagtttagagggtattaaatatttgagaaatatgcttatgtttggtattgttattgttttatttttggtttggacttttaatttcctatttcttattagtgcttcattcaaatggatttattcgatgtctctaagatttgatttccttttctttttcacacaactgtgtgtttgctcattagtaaaagttgaataatatacagtgtttacattttaatatttaattgttggatgaatctcacttcaaggggtaaaggctatagttcattgacagtgatgaaataacctagctggctttcatataaatagcaacgaatgtgcacaatagttacattacatggtatatttaacaacactgctaaagagtaagatgggagttcagtctttcctgatggagatacacctgagtgcattcagagaaaatttggttctgcaagcttgaaggaagtaattgttattcaacagaaatcaactaactttgcatatcagtaaaatacacacacatactcttagctattttctgagtgctctggaactgatatcaaaatagcaaatatatatttatgagaagtagaaatgctgtattcttttcagtcacataaactcagtgtaattatgaaattaacttaactttgagaagatatgaaaaatgttacttcttaaccaagtaaagatctaataaaaactacaaattttatatcaagttacatcatttttacatgcacatttgtaccccaaataccatgccattaattaatttttcactgttcatttctagatggaagactgtatttgaaaactactgtcatgtactgaatctttcctgttgaagaaatccatgttatagaaaagaactttgcagtcagacattcgtcatgggaaagttcagaaaaaaataaagtccttttaagggaacttcctgaattttgtgtattaatgttctttaaaagtttaagtattctacaaaaaaaaaaaaagttttctccattgattttcacctgtggttcataccagagacctgagaatgtttgtaaatgtacaagtatcaaagttcttacagttaattactgcaacttgctgctggacaattgtatacagagttaaaggcaggtctgaataagacctagctttgtttttttctaatggaatgaaccattttcctcttctgaaaattctgtatctgagcacatcaagagactcttgtagcagtggttacccagacttacagaattatgtcctccagaaaccagcaagaacacttggaatgaacgaatgaacttgtagggggcatagaggattcttgaaaaaaaaaaatgcaagagtgattttctgttacattcaatttcaaactctctaattgtgggttttctcctgaagaattttttttcacatactttccaaaagaccaacaaatggatgttgacaacaacccaatgaaataacattttgcatatctgaaaagaagcattgaatataagccaaaagctttcactgaaggtttttttttcttaaaaataaaaaaaaatatataaatgtaacatgttttcattccaaactggtagtggtatatagaattaaagataataatgttgcttcttattcaaactgttggtcatatgtacagtatataaacataaaacacacaaggaaggtattatgtatgcagtagtatactagagtttaggaaaatgaaaattttagaaaatatgttttgtcaccctgttggtcagaaagatgtctttctggttttaacgcatgcaggcatgtaaatatttgtctggagtcacagtattaatgaatgagatcttaagcatctggtgacatcagaactctgtgtcagccacttttatttgtatattgaaccctagctagtgccccaagctgcactattgggaatggattgtggctgaacagcaaatcaaaacaccagaaatatttttatatgttaacgtcatattatgttaatgttgctgaaaacaaaacctaacaaaccttgatgtaccagtccaataccatgtagcgctgagtgataaagttaaaatgtgctgtgcttcccacccttgtcagagggaagggtggctatgtgttattttcactgtctttttgaaagttacagtatgtgttttcactttcgtgcagataactggaagtaaagcggcaaacagtgcttattacatgctaaagttaccttctctttgttttttgcatatctggaattacacctttaaagactgatatgaatcagtacggtcactatacattttatgatttttctgtcatcttaaaattgtatgatcgtaacattatttattaccacaaaacagcaaaatcttcaatgtctaagaaaactagcttaaaatgtttaaatatagttctgattgggtattaattacttgattaagaaaaaattaacattatagatactctggcattacgcttctataccttttaggtcttccttgcaatactggaacataattcttttgtgtagctcactattagccagctaagttcatctttttaataccataaaaaggttatatgtacagttcctattttagcttgcttacaaagggagcattatttttatttaaagtattgctagtaaatgatttgtagaaacttggttttctaagcatagttcttccataaccaccttttgttgtttgagcacaagggattcttttcctagttctatgtgtttgtttccctatatgcagtctttaaaggattacaacacttaaaattgaatggacttgtgtcaagctttttgcatcatacattttttgaaagatttttaaaaaagcctacaacttacatatgtagtagaatcagccattgctctgctcctggcatagagtcacctgttatgtggattaaatagttttaaaatacatatttgaagacctttgagaatgctttagtgtttgatttgaaataaaaggaaattttagcaaggattaaagaaaaaagctatcagctgtatgttaagagagactcttactaacatgttgtaaatattacaattcatgaaatgttattgtaagtctgtaacttaattttttccctgttttagttatacaggttggtttggaaatttgtgttttggcataaacaagtaaaatgtgcccattttatggtttccatgcttttgtaatcctaaaaatattaatgtctagttgttctatattataaccacatttgcgctctatgcaagcccttggaacagaacatactcatcttcatgtaggacctatgaaaattgtctatttttatctatatatttaaagttttctaaaaatgataaaaggttattacgaattttgttgtacaaaatctgtacaaaaatctgtttttacatcataatgcaagaattggaaatttttctatggtagcctagttatttgagcctggtttcaatgtgagaaccacgtttactgttattgtatttaattttcttttccttttcaacaatctcctaataaaactgtctgaaatctc

SEQ ID NO: 499 - DNA, 3996 bp, Homo sapiens
ctgacagcagccgctgcagcagctgctgctgctaccaatgcagctattgctgaagcaatgaaggtgaaaaaaatcaaattagaagccatgagcaactatcatgccagtaataaccaacatggagcagactctgaaaacggggacatgaattcaagtgtcggcagcagtgatggttcctgggataaggaaacactgccctcttccccatcccagggacctcaggcctctataacccacccccgcatgcctggagcacgtagccttccacttagtcatcctctcaaccatcttcagcagagccaccttctgccaaatggactggaacttccttttatgatgatgccccaccctctaattcctgtcagcctacctccagcatctgtcaccatggcaatgagccagatgaaccacctcagcaccattgcaaatatggcagcagcagcacaagttcagagtcccccatccagagttgagacatcagttattaaggagcgtgttcctgatagcccctcacctgccccctctctggaggaggggagaaggcctggcagtcacccatcatcacatcgcagcagcagcgtgtccagctcccctgctcggactgagagctcttctgacagaatcccggtccatcagaatgggttgtccatgaaccagatgctgatgggcttatcaccaaatgtacttcctgggcccaaagagggagatttggccggtcatgacatgggacatgagtcaaaaaggatgcatattgaaaaagatgagaccccgctttctacaccaaccgcaagagacagccttgacaaactctctctaactgggcatggacaaccactgcctccaggttttccatctccttttctgtttcctgatggactgtcttccatcgagactcttctgactaacatacaggggctgttgaaagttgccatagataatgccagagctcaagagaaacaggtccaactggaaaaaactgagctgaagatggattttttaagggaaagagaactaagggaaacacttgagaagcagttggctatggaacaaaagaatagagccatagttcaaaagaggctaaagaaggagaagaaggcaaagagaaaattgcaggaagcacttgagtttgagacgaaacggcgtgaacaagcagaacagacgctaaaacaggcagcttcaacagatagtctcagggtcttaaatgactctctgaccccagagatagaggctgaccgcagtggcggcagaacagatgctgaaaggacaatacaagatggaagactgtatttgaaaactactgtcatgtactgaatctttcctgttgaagaaatccatgttatagaaaagaactttgcagtcagacattcgtcatgggaaagttcagaaaaaaataaagtccttttaagggaacttcctgaattttgtgtattaatgttctttaaaagtttaagtattctacaaaaaaaaaaaaagttttctccattgattttcacctgtggttcataccagagacctgagaatgtttgtaaatgtacaagtatcaaagttcttacagttaattactgcaacttgctgctggacaattgtatacagagttaaaggcaggtctgaataagacctagctttgtttttttctaatggaatgaaccattttcctcttctgaaaattctgtatctgagcacatcaagagactcttgtagcagtggttacccagacttacagaattatgtcctccagaaaccagcaagaacacttggaatgaacgaatgaacttgtagggggcatagaggattcttgaaaaaaaaaaatgcaagagtgattttctgttacattcaatttcaaactctctaattgtgggttttctcctgaagaattttttttcacatactttccaaaagaccaacaaatggatgttgacaacaacccaatgaaataacattttgcatatctgaaaagaagcattgaatataagccaaaagctttcactgaaggtttttttttcttaaaaataaaaaaaaatatataaatgtaacatgttttcattccaaactggtagtggtatatagaattaaagataataatgttgcttcttattcaaactgttggtcatatgtacagtatataaacataaaacacacaaggaaggtattatgtatgcagtagtatactagagtttaggaaaatgaaaattttagaaaatatgttttgtcaccctgttggtcagaaagatgtctttctggttttaacgcatgcaggcatgtaaatatttgtctggagtcacagtattaatgaatgagatcttaagcatctggtgacatcagaactctgtgtcagccacttttatttgtatattgaaccctagctagtgccccaagctgcactattgggaatggattgtggctgaacagcaaatcaaaacaccagaaatatttttatatgttaacgtcatattatgttaatgttgctgaaaacaaaacctaacaaaccttgatgtaccagtccaataccatgtagcgctgagtgataaagttaaaatgtgctgtgcttcccacccttgtcagagggaagggtggctatgtgttattttcactgtctttttgaaagttacagtatgtgttttcactttcgtgcagataactggaagtaaagcggcaaacagtgcttattacatgctaaagttaccttctctttgttttttgcatatctggaattacacctttaaagactgatatgaatcagtacggtcactatacattttatgatttttctgtcatcttaaaattgtatgatcgtaacattatttattaccacaaaacagcaaaatcttcaatgtctaagaaaactagcttaaaatgtttaaatatagttctgattgggtattaattacttgattaagaaaaaattaacattatagatactctggcattacgcttctataccttttaggtcttccttgcaatactggaacataattcttttgtgtagctcactattagccagctaagttcatctttttaataccataaaaaggttatatgtacagttcctattttagcttgcttacaaagggagcattatttttatttaaagtattgctagtaaatgatttgtagaaacttggttttctaagcatagttcttccataaccaccttttgttgtttgagcacaagggattcttttcctagttctatgtgtttgtttccctatatgcagtctttaaaggattacaacacttaaaattgaatggacttgtgtcaagctttttgcatcatacattttttgaaagatttttaaaaaagcctacaacttacatatgtagtagaatcagccattgctctgctcctggcatagagtcacctgttatgtggattaaatagttttaaaatacatatttgaagacctttgagaatgctttagtgtttgatttgaaataaaaggaaattttagcaaggattaaagaaaaaagctatcagctgtatgttaagagagactcttactaacatgttgtaaatattacaattcatgaaatgttattgtaagtctgtaacttaattttttccctgttttagttatacaggttggtttggaaatttgtgttttggcataaacaagtaaaatgtgcccattttatggtttccatgcttttgtaatcctaaaaatattaatgtctagttgttctatattataaccacatttgcgctctatgcaagcccttggaacagaacatactcatcttcatgtaggacctatgaaaattgtctatttttatctatatatttaaagttttctaaaaatgataaaaggttattacgaattttgttgtacaaaatctgtacaaaaatctgtttttacatcataatgcaagaattggaaatttttctatggtagcctagttatttgagcctggtttcaatgtgagaaccacgtttactgttattgtatttaattttcttttccttttcaacaatctcctaataaaactgtctgaaatctc

SEQ ID NO: 500 - protein, 415 aa, Homo sapiens
MKVKKIKLEAMSNYHNNQHGADSENGDMNSSVGSSDGSWDKETLPSSPSQGPQASITHPRMPGARSLPLSHPLNHLQQSHLLPNGLELPFMMMPHPLIPVSLPPASVTMAMSQMNHLSTIANMAAAAQVQSPPSRVETSVIKERVPDSPSPAPSLEEGRRPGSHPSSHRSSSVSSSPARTESSSDRIPVHQNGLSMNQMLMGLSPNVLPGPKEGDLAGHDMGHESKRMHIEKDETPLSTPTARDSLDKLSLTGHGQPLPPGFPSPFLFPDGLSSIETLLTNIQGLLKVAIDNARAQEKQVQLEKTELKMDFLRERELRETLEKQLAMEQKNRAIVQKRLKKEKKAKRKLQEALEFETKRREQAEQTLKQAASTDSLRVLNDSLTPEIEADRSGGRTDAERTIQDGRLYLKTTVMY

SEQ ID NO: 501 - DNA, 5280 bp, Homo sapiens
atctttgatcaatgtacttgccagggagagcccaagtccttcaaacctcctccttttcaccttcatccttaactttgtgctagagcgagacccacacaacaacagccgaccctccccgccccacccccacccccaaaccagccctcgatcccagcccccggagaggactcgcatttcgacttgcgggacacttttgtgcgttcctctccagagcgcctctcgtgctcgcccctcttgcgctcgctctttattaccttcacctccttttctcccccttctctccctttctccttctcgttctctcccggagttgttgttgcccccctcgctccttctccccccttttttccccttcccctcccgggggtgtgtggcaacttttcctctcgcttctcctccgtctgtttccccttatatgtgaccatggcagtgccggcggctttgatccctccgacccagctggtcccccctcaacccccaatctccacgtctgcttcctcctctggcaccaccacctccacctcttcggcgacttcgtctccggctccttccatcggacccccggcgtcctctgggccaactctgttccgcccggagcccatcgcttcggcggcggcggcggcggccacagtcacctctaccggcggcggcggcggcggcggcggcggcggcagcggaggcggcggcggcagcagcggcaacggaggcggcggtggcggcggcggcggtggcagcaactgcaaccccaacctggcggccgcgagcaacggcagcggcggcggcggcggcggcatcagcgctggcggcggcgtcgcttccagcacccccatcaacgccagcaccggcagcagcagcagcagcagtagcagcagcagcagcagcagcagtagtagcagcagcagcagtagcagcagcagctgcggccccctccccgggaaacccgtgtactcaaccccgtccccagtggaaaacacccctcagaataatgagtgcaaaatggtggatctgaggggggccaaagtggcttccttcacggtggagggctgcgagctgatctgcctgccccaggctttcgacctgttcctgaagcacttggtggggggcttgcatacggtctacaccaagctgaagcggctggagatcacgccggtggtgtgcaatgtggaacaagttcgcatcctgaggggactgggcgccatccagccaggagtgaaccgctgcaaactcatctccaggaaggacttcgagaccctctacaatgactgcaccaacgcaagttctagacctggaaggcctcctaagaggactcaaagtgtcacctccccagagaactctcacatcatgccgcattctgtccctggtctcatgtctcctgggataattccaccaacaggtctgacagcagccgctgcagcagctgctgctgctaccaatgcagctattgctgaagcaatgaaggtgaaaaaaatcaaattagaagccatgagcaactatcatgccagtaataaccaacatggagcagactctgaaaacggggacatgaattcaagtgtcggactggaacttccttttatgatgatgccccaccctctaattcctgtcagcctacctccagcatctgtcaccatggcaatgagccagatgaaccacctcagcaccattgcaaatatggcagcagcagcacaagttcagagtcccccatccagagttgagacatcagttattaaggagcgtgttcctgatagcccctcacctgccccctctctggaggaggggagaaggcctggcagtcacccatcatcacatcgcagcagcagcgtgtccagctcccctgctcggactgagagctcttctgacagaatcccggtccatcagaatgggttgtccatgaaccagatgctgatgggcttatcaccaaatgtacttcctgggcccaaagagggagatttggccggtcatgacatgggacatgagtcaaaaaggatgcatattgaaaaagatgagaccccgctttctacaccaaccgcaagagacagccttgacaaactctctctaactgggcatggacaaccactgcctccaggttttccatctccttttctgtttcctgatggactgtcttccatcgagactcttctgactaacatacaggggctgttgaaagttgccatagataatgccagagctcaagagaaacaggtccaactggaaaaaactgagctgaagatggattttttaagggaaagagaactaagggaaacacttgagaagcagttggctatggaacaaaagaatagagccatagttcaaaagaggctaaagaaggagaagaaggcaaagagaaaattgcaggaagcacttgagtttgagacgaaacggcgtgaacaagcagaacagacgctaaaacaggcagcttcaacagatagtctcagggtcttaaatggaatcaaatgaaatatgtgtcactcttacctttctgtgcttttagactctctgaccccagagatagaggctgaccgcagtggcggcagaacagatgctgaaaggacaatacaagatggaagactgtatttgaaaactactgtcatgtactgaatctttcctgttgaagaaatccatgttatagaaaagaactttgcagtcagacattcgtcatgggaaagttcagaaaaaaataaagtccttttaagggaacttcctgaattttgtgtattaatgttctttaaaagtttaagtattctacaaaaaaaaaaaaagttttctccattgattttcacctgtggttcataccagagacctgagaatgtttgtaaatgtacaagtatcaaagttcttacagttaattactgcaacttgctgctggacaattgtatacagagttaaaggcaggtctgaataagacctagctttgtttttttctaatggaatgaaccattttcctcttctgaaaattctgtatctgagcacatcaagagactcttgtagcagtggttacccagacttacagaattatgtcctccagaaaccagcaagaacacttggaatgaacgaatgaacttgtagggggcatagaggattcttgaaaaaaaaaaatgcaagagtgattttctgttacattcaatttcaaactctctaattgtgggttttctcctgaagaattttttttcacatactttccaaaagaccaacaaatggatgttgacaacaacccaatgaaataacattttgcatatctgaaaagaagcattgaatataagccaaaagctttcactgaaggtttttttttcttaaaaataaaaaaaaatatataaatgtaacatgttttcattccaaactggtagtggtatatagaattaaagataataatgttgcttcttattcaaactgttggtcatatgtacagtatataaacataaaacacacaaggaaggtattatgtatgcagtagtatactagagtttaggaaaatgaaaattttagaaaatatgttttgtcaccctgttggtcagaaagatgtctttctggttttaacgcatgcaggcatgtaaatatttgtctggagtcacagtattaatgaatgagatcttaagcatctggtgacatcagaactctgtgtcagccacttttatttgtatattgaaccctagctagtgccccaagctgcactattgggaatggattgtggctgaacagcaaatcaaaacaccagaaatatttttatatgttaacgtcatattatgttaatgttgctgaaaacaaaacctaacaaaccttgatgtaccagtccaataccatgtagcgctgagtgataaagttaaaatgtgctgtgcttcccacccttgtcagagggaagggtggctatgtgttattttcactgtctttttgaaagttacagtatgtgttttcactttcgtgcagataactggaagtaaagcggcaaacagtgcttattacatgctaaagttaccttctctttgttttttgcatatctggaattacacctttaaagactgatatgaatcagtacggtcactatacattttatgatttttctgtcatcttaaaattgtatgatcgtaacattatttattaccacaaaacagcaaaatcttcaatgtctaagaaaactagcttaaaatgtttaaatatagttctgattgggtattaattacttgattaagaaaaaattaacattatagatactctggcattacgcttctataccttttaggtcttccttgcaatactggaacataattcttttgtgtagctcactattagccagctaagttcatctttttaataccataaaaaggttatatgtacagttcctattttagcttgcttacaaagggagcattatttttatttaaagtattgctagtaaatgatttgtagaaacttggttttctaagcatagttcttccataaccaccttttgttgtttgagcacaagggattcttttcctagttctatgtgtttgtttccctatatgcagtctttaaaggattacaacacttaaaattgaatggacttgtgtcaagctttttgcatcatacattttttgaaagatttttaaaaaagcctacaacttacatatgtagtagaatcagccattgctctgctcctggcatagagtcacctgttatgtggattaaatagttttaaaatacatatttgaagacctttgagaatgctttagtgtttgatttgaaataaaaggaaattttagcaaggattaaagaaaaaagctatcagctgtatgttaagagagactcttactaacatgttgtaaatattacaattcatgaaatgttattgtaagtctgtaacttaattttttccctgttttagttatacaggttggtttggaaatttgtgttttggcataaacaagtaaaatgtgcccattttatggtttccatgcttttgtaatcctaaaaatattaatgtctagttgttctatattataaccacatttgcgctctatgcaagcccttggaacagaacatactcatcttcatgtaggacctatgaaaattgtctatttttatctatatatttaaagttttctaaaaatgataaaaggttattacgaattttgttgtacaaaatctgtacaaaaatctgtttttacatcataatgcaagaattggaaatttttctatggtagcctagttatttgagcctggtttcaatgtgagaaccacgtttactgttattgtatttaattttcttttccttttcaacaatctcctaataaaactgtctgaaatctc

SEQ ID NO: 502 - protein, 672 aa, Homo sapiens
MAVPAALIPPTQLVPPQPPISTSASSSGTTTSTSSATSSPAPSIGPPASSGPTLFRPEPIASAAAAAATVTSTGGGGGGGGGGSGGGGGSSGNGGGGGGGGGGSNCNPNLAANGSGGGGGGISAGGGVASSTPINASTGSSSSSSSSSSSSSSSSSSSSSSSSCGPLPGKPVYSTPSPVENTPQNNECKMVDLRGAKVASFTVEGCELICLPQAFDLFLKHLVGGLHTVYTKLKRLEITPVVCNVEQVRILRGLGAIQPGVNRCKLISRKDFETLYNDCTNASSRPGRPPKRTQSVTSPENSHIMPHSVPGLMSPGIIPPTGLTAAAAAAAAATNAAIAEAMKVKKIKLEAMSNYHNNQHGADSENGDMNSSVGLELPFMMMPHPLIPVSLPPASVTMAMSQMNHLSTIANMAAAAQVQSPPSRVETSVIKERVPDSPSPAPSLEEGRRPGSHPSSHRSSSVSSSPARTESSSDRIPVHQNGLSMNQMLMGLSPNVLPGPKEGDLAGHDMGHESKRMHIEKDETPLSTPTARDSLDKLSLTGHGQPLPPGFPSPFLFPDGLSSIETLLTNIQGLLKVAIDNARAQEKQVQLEKTELKMDFLRERELRETLEKQLAMEQKNRAIVQKRLKKEKKAKRKLQEALEFETKRREQAEQTLKQAASTDSLRVLNGIK

SEQ ID NO: 503 - DNA, 4629 bp, Homo sapiens
atctttgatcaatgtacttgccagggagagcccaagtccttcaaacctcctccttttcaccttcatccttaactttgtgctagagcgagacccacacaacaacagccgaccctccccgccccacccccacccccaaaccagccctcgatcccagcccccggagaggactcgcatttcgacttgcgggacacttttgtgcgttcctctccagagcgcctctcgtgctcgcccctcttgcgctcgctctttattaccttcacctccttttctcccccttctctccctttctccttctcgttctctcccggagttgttgttgcccccctcgctccttctccccccttttttccccttcccctcccgggggtgtgtggcaacttttcctctcgcttctcctccgtctgtttccccttatatgtgaccatggcagtgccggcggctttgatccctccgacccagctggtcccccctcaacccccaatctccacgtctgcttcctcctctggcaccaccacctccacctcttcggcgacttcgtctccggctccttccatcggacccccggcgtcctctgggccaactctgttccgcccggagcccatcgcttcggcggcggcggcggcggccacagtcacctctaccggcggcggcggcggcggcggcggcggcggcagcggaggcggcggcggcagcagcggcaacggaggcggcggtggcggcggcggcggtggcagcaactgcaaccccaacctggcggccgcgagcaacggcagcggcggcggcggcggcggcatcagcgctggcggcggcgtcgcttccagcacccccatcaacgccagcaccggcagcagcagcagcagcagtagcagcagcagcagcagcagcagtagtagcagcagcagcagtagcagcagcagctgcggccccctccccgggaaacccgtgtactcaaccccgtccccagtggaaaacacccctcagaataatgagtgcaaaatggtggatctgaggggggccaaagtggcttccttcacggtggagggctgcgagctgatctgcctgccccaggctttcgacctgttcctgaagcacttggtggggggcttgcatacggtctacaccaagctgaagcggctggagatcacgccggtggtgtgcaatgtggaacaagttcgcatcctgaggggactgggcgccatccagccaggagtgaaccgctgcaaactcatctccaggaaggacttcgagaccctctacaatgactgcaccaacgcaagttctagacctggaaggcctcctaagaggactcaaagtgtcacctccccagagaactctcacatcatgccgcattctgtccctggtctcatgtctcctgggataattccaccaacagatgagaccccgctttctacaccaaccgcaagagacagccttgacaaactctctctaactgggcatggacaaccactgcctccaggttttccatctccttttctgtttcctgatggactgtcttccatcgagactcttctgactaacatacaggggctgttgaaagttgccatagataatgccagagctcaagagaaacaggtccaactggaaaaaactgagctgaagatggattttttaagggaaagagaactaagggaaacacttgagaagcagttggctatggaacaaaagaatagagccatagttcaaaagaggctaaagaaggagaagaaggcaaagagaaaattgcaggaagcacttgagtttgagacgaaacggcgtgaacaagcagaacagacgctaaaacaggcagcttcaacagatagtctcagggtcttaaatgactctctgaccccagagatagaggctgaccgcagtggcggcagaacagatgctgaaaggacaatacaagatggaagactgtatttgaaaactactgtcatgtactgaatctttcctgttgaagaaatccatgttatagaaaagaactttgcagtcagacattcgtcatgggaaagttcagaaaaaaataaagtccttttaagggaacttcctgaattttgtgtattaatgttctttaaaagtttaagtattctacaaaaaaaaaaaaagttttctccattgattttcacctgtggttcataccagagacctgagaatgtttgtaaatgtacaagtatcaaagttcttacagttaattactgcaacttgctgctggacaattgtatacagagttaaaggcaggtctgaataagacctagctttgtttttttctaatggaatgaaccattttcctcttctgaaaattctgtatctgagcacatcaagagactcttgtagcagtggttacccagacttacagaattatgtcctccagaaaccagcaagaacacttggaatgaacgaatgaacttgtagggggcatagaggattcttgaaaaaaaaaaatgcaagagtgattttctgttacattcaatttcaaactctctaattgtgggttttctcctgaagaattttttttcacatactttccaaaagaccaacaaatggatgttgacaacaacccaatgaaataacattttgcatatctgaaaagaagcattgaatataagccaaaagctttcactgaaggtttttttttcttaaaaataaaaaaaaatatataaatgtaacatgttttcattccaaactggtagtggtatatagaattaaagataataatgttgcttcttattcaaactgttggtcatatgtacagtatataaacataaaacacacaaggaaggtattatgtatgcagtagtatactagagtttaggaaaatgaaaattttagaaaatatgttttgtcaccctgttggtcagaaagatgtctttctggttttaacgcatgcaggcatgtaaatatttgtctggagtcacagtattaatgaatgagatcttaagcatctggtgacatcagaactctgtgtcagccacttttatttgtatattgaaccctagctagtgccccaagctgcactattgggaatggattgtggctgaacagcaaatcaaaacaccagaaatatttttatatgttaacgtcatattatgttaatgttgctgaaaacaaaacctaacaaaccttgatgtaccagtccaataccatgtagcgctgagtgataaagttaaaatgtgctgtgcttcccacccttgtcagagggaagggtggctatgtgttattttcactgtctttttgaaagttacagtatgtgttttcactttcgtgcagataactggaagtaaagcggcaaacagtgcttattacatgctaaagttaccttctctttgttttttgcatatctggaattacacctttaaagactgatatgaatcagtacggtcactatacattttatgatttttctgtcatcttaaaattgtatgatcgtaacattatttattaccacaaaacagcaaaatcttcaatgtctaagaaaactagcttaaaatgtttaaatatagttctgattgggtattaattacttgattaagaaaaaattaacattatagatactctggcattacgcttctataccttttaggtcttccttgcaatactggaacataattcttttgtgtagctcactattagccagctaagttcatctttttaataccataaaaaggttatatgtacagttcctattttagcttgcttacaaagggagcattatttttatttaaagtattgctagtaaatgatttgtagaaacttggttttctaagcatagttcttccataaccaccttttgttgtttgagcacaagggattcttttcctagttctatgtgtttgtttccctatatgcagtctttaaaggattacaacacttaaaattgaatggacttgtgtcaagctttttgcatcatacattttttgaaagatttttaaaaaagcctacaacttacatatgtagtagaatcagccattgctctgctcctggcatagagtcacctgttatgtggattaaatagttttaaaatacatatttgaagacctttgagaatgctttagtgtttgatttgaaataaaaggaaattttagcaaggattaaagaaaaaagctatcagctgtatgttaagagagactcttactaacatgttgtaaatattacaattcatgaaatgttattgtaagtctgtaacttaattttttccctgttttagttatacaggttggtttggaaatttgtgttttggcataaacaagtaaaatgtgcccattttatggtttccatgcttttgtaatcctaaaaatattaatgtctagttgttctatattataaccacatttgcgctctatgcaagcccttggaacagaacatactcatcttcatgtaggacctatgaaaattgtctatttttatctatatatttaaagttttctaaaaatgataaaaggttattacgaattttgttgtacaaaatctgtacaaaaatctgtttttacatcataatgcaagaattggaaatttttctatggtagcctagttatttgagcctggtttcaatgtgagaaccacgtttactgttattgtatttaattttcttttccttttcaacaatctcctaataaaactgtctgaaatctc

SEQ ID NO: 504 - protein, 504 aa, Homo sapiens
MAVPAALIPPTQLVPPQPPISTSASSSGTTTSTSSATSSPAPSIGPPASSGPTLFRPEPIASAAAAAATVTSTGGGGGGGGGGSGGGGGSSGNGGGGGGGGGGSNCNPNLAANGSGGGGGGISAGGGVASSTPINASTGSSSSSSSSSSSSSSSSSSSSSSSSCGPLPGKPVYSTPSPVENTPQNNECKMVDLRGAKVASFTVEGCELICLPQAFDLFLKHLVGGLHTVYTKLKRLEITPVVCNVEQVRILRGLGAIQPGVNRCKLISRKDFETLYNDCTNASSRPGRPPKRTQSVTSPENSHIMPHSVPGLMSPGIIPPTDETPLSTPTARDSLDKLSLTGHGQPLPPGFPSPFLFPDGLSSIETLLTNIQGLLKVAIDNARAQEKQVQLEKTELKMDFLRERELRETLEKQLAMEQKNRAIVQKRLKKEKKAKRKLQEALEFETKRREQAEQTLKQAASTDSLRVLNDSLTPEIEADRSGGRTDAERTIQDGRLYLKTTVMY

SEQ ID NO: 505 - DNA, 5235 bp, Homo sapiens
atctttgatcaatgtacttgccagggagagcccaagtccttcaaacctcctccttttcaccttcatccttaactttgtgctagagcgagacccacacaacaacagccgaccctccccgccccacccccacccccaaaccagccctcgatcccagcccccggagaggactcgcatttcgacttgcgggacacttttgtgcgttcctctccagagcgcctctcgtgctcgcccctcttgcgctcgctctttattaccttcacctccttttctcccccttctctccctttctccttctcgttctctcccggagttgttgttgcccccctcgctccttctccccccttttttccccttcccctcccgggggtgtgtggcaacttttcctctcgcttctcctccgtctgtttccccttatatgtgaccatggcagtgccggcggctttgatccctccgacccagctggtcccccctcaacccccaatctccacgtctgcttcctcctctggcaccaccacctccacctcttcggcgacttcgtctccggctccttccatcggacccccggcgtcctctgggccaactctgttccgcccggagcccatcgcttcggcggcggcggcggcggccacagtcacctctaccggcggcggcggcggcggcggcggcggcggcagcggaggcggcggcggcagcagcggcaacggaggcggcggtggcggcggcggcggtggcagcaactgcaaccccaacctggcggccgcgagcaacggcagcggcggcggcggcggcggcatcagcgctggcggcggcgtcgcttccagcacccccatcaacgccagcaccggcagcagcagcagcagcagtagcagcagcagcagcagcagcagtagtagcagcagcagcagtagcagcagcagctgcggccccctccccgggaaacccgtgtactcaaccccgtccccagtggaaaacacccctcagaataatgagtgcaaaatggtggatctgaggggggccaaagtggcttccttcacggtggagggctgcgagctgatctgcctgccccaggctttcgacctgttcctgaagcacttggtggggggcttgcatacggtctacaccaagctgaagcggctggagatcacgccggtggtgtgcaatgtggaacaagttcgcatcctgaggggactgggcgccatccagccaggagtgaaccgctgcaaactcatctccaggaaggacttcgagaccctctacaatgactgcaccaacgcaagttctagacctggaaggcctcctaagaggactcaaagtgtcacctccccagagaactctcacatcatgccgcattctgtccctggtctcatgtctcctgggataattccaccaacaggtctgacagcagccgctgcagcagctgctgctgctaccaatgcagctattgctgaagcaatgaaggtgaaaaaaatcaaattagaagccatgagcaactatcatgccagtaataaccaacatggagcagactctgaaaacggggacatgaattcaagtgtcggactggaacttccttttatgatgatgccccaccctctaattcctgtcagcctacctccagcatctgtcaccatggcaatgagccagatgaaccacctcagcaccattgcaaatatggcagcagcagcacaagttcagagtcccccatccagagttgagacatcagttattaaggagcgtgttcctgatagcccctcacctgccccctctctggaggaggggagaaggcctggcagtcacccatcatcacatcgcagcagcagcgtgtccagctcccctgctcggactgagagctcttctgacagaatcccggtccatcagaatgggttgtccatgaaccagatgctgatgggcttatcaccaaatgtacttcctgggcccaaagagggagatttggccggtcatgacatgggacatgagtcaaaaaggatgcatattgaaaaagatgagaccccgctttctacaccaaccgcaagagacagccttgacaaactctctctaactgggcatggacaaccactgcctccaggttttccatctccttttctgtttcctgatggactgtcttccatcgagactcttctgactaacatacaggggctgttgaaagttgccatagataatgccagagctcaagagaaacaggtccaactggaaaaaactgagctgaagatggattttttaagggaaagagaactaagggaaacacttgagaagcagttggctatggaacaaaagaatagagccatagttcaaaagaggctaaagaaggagaagaaggcaaagagaaaattgcaggaagcacttgagtttgagacgaaacggcgtgaacaagcagaacagacgctaaaacaggcagcttcaacagatagtctcagggtcttaaatgactctctgaccccagagatagaggctgaccgcagtggcggcagaacagatgctgaaaggacaatacaagatggaagactgtatttgaaaactactgtcatgtactgaatctttcctgttgaagaaatccatgttatagaaaagaactttgcagtcagacattcgtcatgggaaagttcagaaaaaaataaagtccttttaagggaacttcctgaattttgtgtattaatgttctttaaaagtttaagtattctacaaaaaaaaaaaaagttttctccattgattttcacctgtggttcataccagagacctgagaatgtttgtaaatgtacaagtatcaaagttcttacagttaattactgcaacttgctgctggacaattgtatacagagttaaaggcaggtctgaataagacctagctttgtttttttctaatggaatgaaccattttcctcttctgaaaattctgtatctgagcacatcaagagactcttgtagcagtggttacccagacttacagaattatgtcctccagaaaccagcaagaacacttggaatgaacgaatgaacttgtagggggcatagaggattcttgaaaaaaaaaaatgcaagagtgattttctgttacattcaatttcaaactctctaattgtgggttttctcctgaagaattttttttcacatactttccaaaagaccaacaaatggatgttgacaacaacccaatgaaataacattttgcatatctgaaaagaagcattgaatataagccaaaagctttcactgaaggtttttttttcttaaaaataaaaaaaaatatataaatgtaacatgttttcattccaaactggtagtggtatatagaattaaagataataatgttgcttcttattcaaactgttggtcatatgtacagtatataaacataaaacacacaaggaaggtattatgtatgcagtagtatactagagtttaggaaaatgaaaattttagaaaatatgttttgtcaccctgttggtcagaaagatgtctttctggttttaacgcatgcaggcatgtaaatatttgtctggagtcacagtattaatgaatgagatcttaagcatctggtgacatcagaactctgtgtcagccacttttatttgtatattgaaccctagctagtgccccaagctgcactattgggaatggattgtggctgaacagcaaatcaaaacaccagaaatatttttatatgttaacgtcatattatgttaatgttgctgaaaacaaaacctaacaaaccttgatgtaccagtccaataccatgtagcgctgagtgataaagttaaaatgtgctgtgcttcccacccttgtcagagggaagggtggctatgtgttattttcactgtctttttgaaagttacagtatgtgttttcactttcgtgcagataactggaagtaaagcggcaaacagtgcttattacatgctaaagttaccttctctttgttttttgcatatctggaattacacctttaaagactgatatgaatcagtacggtcactatacattttatgatttttctgtcatcttaaaattgtatgatcgtaacattatttattaccacaaaacagcaaaatcttcaatgtctaagaaaactagcttaaaatgtttaaatatagttctgattgggtattaattacttgattaagaaaaaattaacattatagatactctggcattacgcttctataccttttaggtcttccttgcaatactggaacataattcttttgtgtagctcactattagccagctaagttcatctttttaataccataaaaaggttatatgtacagttcctattttagcttgcttacaaagggagcattatttttatttaaagtattgctagtaaatgatttgtagaaacttggttttctaagcatagttcttccataaccaccttttgttgtttgagcacaagggattcttttcctagttctatgtgtttgtttccctatatgcagtctttaaaggattacaacacttaaaattgaatggacttgtgtcaagctttttgcatcatacattttttgaaagatttttaaaaaagcctacaacttacatatgtagtagaatcagccattgctctgctcctggcatagagtcacctgttatgtggattaaatagttttaaaatacatatttgaagacctttgagaatgctttagtgtttgatttgaaataaaaggaaattttagcaaggattaaagaaaaaagctatcagctgtatgttaagagagactcttactaacatgttgtaaatattacaattcatgaaatgttattgtaagtctgtaacttaattttttccctgttttagttatacaggttggtttggaaatttgtgttttggcataaacaagtaaaatgtgcccattttatggtttccatgcttttgtaatcctaaaaatattaatgtctagttgttctatattataaccacatttgcgctctatgcaagcccttggaacagaacatactcatcttcatgtaggacctatgaaaattgtctatttttatctatatatttaaagttttctaaaaatgataaaaggttattacgaattttgttgtacaaaatctgtacaaaaatctgtttttacatcataatgcaagaattggaaatttttctatggtagcctagttatttgagcctggtttcaatgtgagaaccacgtttactgttattgtatttaattttcttttccttttcaacaatctcctaataaaactgtctgaaatctc

SEQ ID NO: 506 - protein, 704 aa, Homo sapiens
MAVPAALIPPTQLVPPQPPISTSASSSGTTTSTSSATSSPAPSIGPPASSGPTLFRPEPIASAAAAAATVTSTGGGGGGGGGGSGGGGGSSGNGGGGGGGGGGSNCNPNLAANGSGGGGGGISAGGGVASSTPINASTGSSSSSSSSSSSSSSSSSSSSSSSSCGPLPGKPVYSTPSPVENTPQNNECKMVDLRGAKVASFTVEGCELICLPQAFDLFLKHLVGGLHTVYTKLKRLEITPVVCNVEQVRILRGLGAIQPGVNRCKLISRKDFETLYNDCTNASSRPGRPPKRTQSVTSPENSHIMPHSVPGLMSPGIIPPTGLTAAAAAAAAATNAAIAEAMKVKKIKLEAMSNYHNNQHGADSENGDMNSSVGLELPFMMMPHPLIPVSLPPASVTMAMSQMNHLSTIANMAAAAQVQSPPSRVETSVIKERVPDSPSPAPSLEEGRRPGSHPSSHRSSSVSSSPARTESSSDRIPVHQNGLSMNQMLMGLSPNVLPGPKEGDLAGHDMGHESKRMHIEKDETPLSTPTARDSLDKLSLTGHGQPLPPGFPSPFLFPDGLSSIETLLTNIQGLLKVAIDNARAQEKQVQLEKTELKMDFLRERELRETLEKQLAMEQKNRAIVQKRLKKEKKAKRKLQEALEFETKRREQAEQTLKQAASTDSLRVLNDSLTPEIEADRSGGRTDAERTIQDGRLYLKTTVMY
